United States Patent Application Publication US 2018/0127501 A1 - sequence listing, part 2

SEQ ID NO: 15783 - protein, 107 aa, Artificial Sequence
  Description of Artificial Sequence: Synthetic polypeptide
  VL of XENP019640
EIVLTQSPATLSVSPGERVTLTCRASQSVGNDVAWYQQKPGQAPRLLINYASHRYTGVPDRFTGSGYGTEFTLTISSVQPEDFAVYYCQQDFSSPRTFGGGTKVEIK

SEQ ID NO: 15784 - protein, 5 aa, Artificial Sequence
  Description of Artificial Sequence: Synthetic peptide
  XENP019640 vhCDR1
NYWMN

SEQ ID NO: 15785 - protein, 19 aa, Artificial Sequence
  Description of Artificial Sequence: Synthetic peptide
  XENP019640 vhCDR2
EIRLYSNNYATHYAESVKG

SEQ ID NO: 15786 - protein, 11 aa, Artificial Sequence
  Description of Artificial Sequence: Synthetic peptide
  XENP019640 vhCDR3
YYGNYGGYFDV

SEQ ID NO: 15787 - protein, 11 aa, Artificial Sequence
  Description of Artificial Sequence: Synthetic peptide
  XENP019640 vlCDR1
RASQSVGNDVA

SEQ ID NO: 15788 - protein, 7 aa, Artificial Sequence
  Description of Artificial Sequence: Synthetic peptide
  XENP019640 vlCDR2
YASHRYT

SEQ ID NO: 15789 - protein, 9 aa, Artificial Sequence
  Description of Artificial Sequence: Synthetic peptide
  XENP019640 vlCDR3
QQDFSSPRT

SEQ ID NO: 15790 - protein, 249 aa, Artificial Sequence
  Description of Artificial Sequence: Synthetic polypeptide
  XENP019641 1G6_H1.278_L1.207_scFv(GKPGS)4
EVQLVESGGGLVKPGGSLRLSCVASGFTFSNYWMNWVRQAPGKGLEWVAEIRLYSNNYATHYAESVKGRFTISRDDSKSTLYLQMNNLKTEDTGVYYCTRYYGNYGGYFDVWGQGTLVTVSSGKPGSGKPGSGKPGSGKPGSEIVLTQSPATLSVSPGERVTLTCRASQSVGNDVAWYQQKPGQAPRLLINYASHRYTGVPDRFTGSGYGTEFTLTISSVQSEDVAVYYCQQDFSSPRTFGGGTKVEIK

SEQ ID NO: 15791 - protein, 122 aa, Artificial Sequence; identical to SEQ ID NO: 15521
  Description of Artificial Sequence: Synthetic polypeptide
  VH of XENP019641

SEQ ID NO: 15792 - protein, 107 aa, Artificial Sequence
  Description of Artificial Sequence: Synthetic polypeptide
  VL of XENP019641
EIVLTQSPATLSVSPGERVTLTCRASQSVGNDVAWYQQKPGQAPRLLINYASHRYTGVPDRFTGSGYGTEFTLTISSVQSEDVAVYYCQQDFSSPRTFGGGTKVEIK

SEQ ID NO: 15793 - protein, 5 aa, Artificial Sequence
  Description of Artificial Sequence: Synthetic peptide
  XENP019641 vhCDR1
NYWMN

SEQ ID NO: 15794 - protein, 19 aa, Artificial Sequence
  Description of Artificial Sequence: Synthetic peptide
  XENP019641 vhCDR2
EIRLYSNNYATHYAESVKG

SEQ ID NO: 15795 - protein, 11 aa, Artificial Sequence
  Description of Artificial Sequence: Synthetic peptide
  XENP019641 vhCDR3
YYGNYGGYFDV

SEQ ID NO: 15796 - protein, 11 aa, Artificial Sequence
  Description of Artificial Sequence: Synthetic peptide
  XENP019641 vlCDR1
RASQSVGNDVA

SEQ ID NO: 15797 - protein, 7 aa, Artificial Sequence
  Description of Artificial Sequence: Synthetic peptide
  XENP019641 vlCDR2
YASHRYT

SEQ ID NO: 15798 - protein, 9 aa, Artificial Sequence
  Description of Artificial Sequence: Synthetic peptide
  XENP019641 vlCDR3
QQDFSSPRT

SEQ ID NO: 15799 - protein, 249 aa, Artificial Sequence
  Description of Artificial Sequence: Synthetic polypeptide
  XENP019642 1G6_H1.278_L1.208_scFv(GKPGS)4
EVQLVESGGGLVKPGGSLRLSCVASGFTFSNYWMNWVRQAPGKGLEWVAEIRLYSNNYATHYAESVKGRFTISRDDSKSTLYLQMNNLKTEDTGVYYCTRYYGNYGGYFDVWGQGTLVTVSSGKPGSGKPGSGKPGSGKPGSEIVLTQSPATLSVSPGERVTLTCRASQSVGNDVAWYQQKPGQAPRLLINYASHRYTGVPDRFTGSGYGTEFTLTISSVQSEDFATYYCQQDFSSPRTFGGGTKVEIK

SEQ ID NO: 15800 - protein, 122 aa, Artificial Sequence; identical to SEQ ID NO: 15521
  Description of Artificial Sequence: Synthetic polypeptide
  VH of XENP019642

SEQ ID NO: 15801 - protein, 107 aa, Artificial Sequence
  Description of Artificial Sequence: Synthetic polypeptide
  VL of XENP019642
EIVLTQSPATLSVSPGERVTLTCRASQSVGNDVAWYQQKPGQAPRLLINYASHRYTGVPDRFTGSGYGTEFTLTISSVQSEDFATYYCQQDFSSPRTFGGGTKVEIK

SEQ ID NO: 15802 - protein, 5 aa, Artificial Sequence
  Description of Artificial Sequence: Synthetic peptide
  XENP019642 vhCDR1
NYWMN

SEQ ID NO: 15803 - protein, 19 aa, Artificial Sequence
  Description of Artificial Sequence: Synthetic peptide
  XENP019642 vhCDR2
EIRLYSNNYATHYAESVKG

SEQ ID NO: 15804 - protein, 11 aa, Artificial Sequence
  Description of Artificial Sequence: Synthetic peptide
  XENP019642 vhCDR3
YYGNYGGYFDV

SEQ ID NO: 15805 - protein, 11 aa, Artificial Sequence
  Description of Artificial Sequence: Synthetic peptide
  XENP019642 vlCDR1
RASQSVGNDVA

SEQ ID NO: 15806 - protein, 7 aa, Artificial Sequence
  Description of Artificial Sequence: Synthetic peptide
  XENP019642 vlCDR2
YASHRYT

SEQ ID NO: 15807 - protein, 9 aa, Artificial Sequence
  Description of Artificial Sequence: Synthetic peptide
  XENP019642 vlCDR3
QQDFSSPRT

SEQ ID NO: 15808 - protein, 249 aa, Artificial Sequence
  Description of Artificial Sequence: Synthetic polypeptide
  XENP019643 1G6_L1.189_H1.279_scFv(GKPGS)4
EIVLTQSPATLSVSPGERVTLTCRASQSVGNDVAWYQQKPGQAPRLLINYASHRYTGVPDRFTGSGYGTEFTLTISSVQSEDFAVYYCQQDFSSPRTFGGGTKVEIKGKPGSGKPGSGKPGSGKPGSEVQLVESGGGLVKPGGSLRLSCVASGFTFSNYWMNWVRQAPGKGLEWVAEIRLYSNNYATHYAESVKGRFTISRDDSKSTLYLQMNNLKTEDTGVYYCTRYYGNYGGYFDVWGRGTLVTVSS

SEQ ID NO: 15809 - protein, 107 aa, Artificial Sequence; identical to SEQ ID NO: 15540
  Description of Artificial Sequence: Synthetic polypeptide
  VH of XENP019643

SEQ ID NO: 15810 - protein, 122 aa, Artificial Sequence; identical to SEQ ID NO: 2872
  Description of Artificial Sequence: Synthetic polypeptide
  VL of XENP019643

SEQ ID NO: 15811 - protein, 11 aa, Artificial Sequence
  Description of Artificial Sequence: Synthetic peptide
  XENP019643 vhCDR1
RASQSVGNDVA

SEQ ID NO: 15812 - protein, 7 aa, Artificial Sequence
  Description of Artificial Sequence: Synthetic peptide
  XENP019643 vhCDR2
YASHRYT

SEQ ID NO: 15813 - protein, 9 aa, Artificial Sequence
  Description of Artificial Sequence: Synthetic peptide
  XENP019643 vhCDR3
QQDFSSPRT

SEQ ID NO: 15814 - protein, 5 aa, Artificial Sequence
  Description of Artificial Sequence: Synthetic peptide
  XENP019643 vlCDR1
NYWMN

SEQ ID NO: 15815 - protein, 19 aa, Artificial Sequence
  Description of Artificial Sequence: Synthetic peptide
  XENP019643 vlCDR2
EIRLYSNNYATHYAESVKG

SEQ ID NO: 15816 - protein, 11 aa, Artificial Sequence
  Description of Artificial Sequence: Synthetic peptide
  XENP019643 vlCDR3
YYGNYGGYFDV

SEQ ID NO: 15817 - protein, 249 aa, Artificial Sequence
  Description of Artificial Sequence: Synthetic polypeptide
  XENP019644 1G6_L1.189_H1.280_scFv(GKPGS)4
EIVLTQSPATLSVSPGERVTLTCRASQSVGNDVAWYQQKPGQAPRLLINYASHRYTGVPDRFTGSGYGTEFTLTISSVQSEDFAVYYCQQDFSSPRTFGGGTKVEIKGKPGSGKPGSGKPGSGKPGSEVQLVESGGGLVKPGGSLRLTCVASGFTFSNYWMNWVRQAPGKGLEWVAEIRLYSNNYATHYAESVKGRFTISRDDSKSTLYLQMNNLKTEDTGVYYCTRYYGNYGGYFDVWGRGTLVTVSS

SEQ ID NO: 15818 - protein, 107 aa, Artificial Sequence; identical to SEQ ID NO: 15540
  Description of Artificial Sequence: Synthetic polypeptide
  VH of XENP019644

SEQ ID NO: 15819 - protein, 122 aa, Artificial Sequence; identical to SEQ ID NO: 15593
  Description of Artificial Sequence: Synthetic polypeptide
  VL of XENP019644

SEQ ID NO: 15820 - protein, 11 aa, Artificial Sequence
  Description of Artificial Sequence: Synthetic peptide
  XENP019644 vhCDR1
RASQSVGNDVA

SEQ ID NO: 15821 - protein, 7 aa, Artificial Sequence
  Description of Artificial Sequence: Synthetic peptide
  XENP019644 vhCDR2
YASHRYT

SEQ ID NO: 15822 - protein, 9 aa, Artificial Sequence
  Description of Artificial Sequence: Synthetic peptide
  XENP019644 vhCDR3
QQDFSSPRT

SEQ ID NO: 15823 - protein, 5 aa, Artificial Sequence
  Description of Artificial Sequence: Synthetic peptide
  XENP019644 vlCDR1
NYWMN

SEQ ID NO: 15824 - protein, 19 aa, Artificial Sequence
  Description of Artificial Sequence: Synthetic peptide
  XENP019644 vlCDR2
EIRLYSNNYATHYAESVKG

SEQ ID NO: 15825 - protein, 11 aa, Artificial Sequence
  Description of Artificial Sequence: Synthetic peptide
  XENP019644 vlCDR3
YYGNYGGYFDV

SEQ ID NO: 15826 - protein, 249 aa, Artificial Sequence
  Description of Artificial Sequence: Synthetic polypeptide
  XENP019645 1G6_L1.189_H1.281_scFv(GKPGS)4
EIVLTQSPATLSVSPGERVTLTCRASQSVGNDVAWYQQKPGQAPRLLINYASHRYTGVPDRFTGSGYGTEFTLTISSVQSEDFAVYYCQQDFSSPRTFGGGTKVEIKGKPGSGKPGSGKPGSGKPGSEVQLVESGGGLVKPGGSLRLSCVASGFTFSNYWMNWVRQAPGKGLEWVAEIRLYSNNYATHYAESVKGRFTISRDDSKSMLYLQMNNLKTEDTGVYYCTRYYGNYGGYFDVWGRGTLVTVSS

SEQ ID NO: 15827 - protein, 107 aa, Artificial Sequence; identical to SEQ ID NO: 15540
  Description of Artificial Sequence: Synthetic polypeptide
  VH of XENP019645

SEQ ID NO: 15828 - protein, 122 aa, Artificial Sequence; identical to SEQ ID NO: 15602
  Description of Artificial Sequence: Synthetic polypeptide
  VL of XENP019645

SEQ ID NO: 15829 - protein, 11 aa, Artificial Sequence
  Description of Artificial Sequence: Synthetic peptide
  XENP019645 vhCDR1
RASQSVGNDVA

SEQ ID NO: 15830 - protein, 7 aa, Artificial Sequence
  Description of Artificial Sequence: Synthetic peptide
  XENP019645 vhCDR2
YASHRYT

SEQ ID NO: 15831 - protein, 9 aa, Artificial Sequence
  Description of Artificial Sequence: Synthetic peptide
  XENP019645 vhCDR3
QQDFSSPRT

SEQ ID NO: 15832 - protein, 5 aa, Artificial Sequence
  Description of Artificial Sequence: Synthetic peptide
  XENP019645 vlCDR1
NYWMN

SEQ ID NO: 15833 - protein, 19 aa, Artificial Sequence
  Description of Artificial Sequence: Synthetic peptide
  XENP019645 vlCDR2
EIRLYSNNYATHYAESVKG

SEQ ID NO: 15834 - protein, 11 aa, Artificial Sequence
  Description of Artificial Sequence: Synthetic peptide
  XENP019645 vlCDR3
YYGNYGGYFDV

SEQ ID NO: 15835 - protein, 249 aa, Artificial Sequence
  Description of Artificial Sequence: Synthetic polypeptide
  XENP019646 1G6_L1.189_H1.282_scFv(GKPGS)4
EIVLTQSPATLSVSPGERVTLTCRASQSVGNDVAWYQQKPGQAPRLLINYASHRYTGVPDRFTGSGYGTEFTLTISSVQSEDFAVYYCQQDFSSPRTFGGGTKVEIKGKPGSGKPGSGKPGSGKPGSEVQLVESGGGLVKPGGSLRLTCVASGFTFSNYWMNWVRQAPGKGLEWVAEIRLYSNNYATHYAESVKGRFTISRDDSKSMLYLQMNNLKTEDTGVYYCTRYYGNYGGYFDVWGRGTLVTVSS

SEQ ID NO: 15836 - protein, 107 aa, Artificial Sequence; identical to SEQ ID NO: 15540
  Description of Artificial Sequence: Synthetic polypeptide
  VH of XENP019646

SEQ ID NO: 15837 - protein, 122 aa, Artificial Sequence; identical to SEQ ID NO: 15611
  Description of Artificial Sequence: Synthetic polypeptide
  VL of XENP019646

SEQ ID NO: 15838 - protein, 11 aa, Artificial Sequence
  Description of Artificial Sequence: Synthetic peptide
  XENP019646 vhCDR1
RASQSVGNDVA

SEQ ID NO: 15839 - protein, 7 aa, Artificial Sequence
  Description of Artificial Sequence: Synthetic peptide
  XENP019646 vhCDR2
YASHRYT

SEQ ID NO: 15840 - protein, 9 aa, Artificial Sequence
  Description of Artificial Sequence: Synthetic peptide
  XENP019646 vhCDR3
QQDFSSPRT

SEQ ID NO: 15841 - protein, 5 aa, Artificial Sequence
  Description of Artificial Sequence: Synthetic peptide
  XENP019646 vlCDR1
NYWMN

SEQ ID NO: 15842 - protein, 19 aa, Artificial Sequence
  Description of Artificial Sequence: Synthetic peptide
  XENP019646 vlCDR2
EIRLYSNNYATHYAESVKG

SEQ ID NO: 15843 - protein, 11 aa, Artificial Sequence
  Description of Artificial Sequence: Synthetic peptide
  XENP019646 vlCDR3
YYGNYGGYFDV

SEQ ID NO: 15844 - protein, 249 aa, Artificial Sequence
  Description of Artificial Sequence: Synthetic polypeptide
  XENP019647 1G6_L1.189_H1.283_scFv(GKPGS)4
EIVLTQSPATLSVSPGERVTLTCRASQSVGNDVAWYQQKPGQAPRLLINYASHRYTGVPDRFTGSGYGTEFTLTISSVQSEDFAVYYCQQDFSSPRTFGGGTKVEIKGKPGSGKPGSGKPGSGKPGSEVQLVESGGGLVKPGGSLRLSCVASGFTFSNYWMNWVRQAPGKGLEWVCEIRLYSNNYATHYAESVKGRFTCSRDDSKSTLYLQMNNLKTEDTGVYYCTRYYGNYGGYFDVWGQGTLVTVSS

SEQ ID NO: 15845 - protein, 107 aa, Artificial Sequence; identical to SEQ ID NO: 15540
  Description of Artificial Sequence: Synthetic polypeptide
  VH of XENP019647

SEQ ID NO: 15846 - protein, 122 aa, Artificial Sequence; identical to SEQ ID NO: 15620
  Description of Artificial Sequence: Synthetic polypeptide
  VL of XENP019647

SEQ ID NO: 15847 - protein, 11 aa, Artificial Sequence
  Description of Artificial Sequence: Synthetic peptide
  XENP019647 vhCDR1
RASQSVGNDVA

SEQ ID NO: 15848 - protein, 7 aa, Artificial Sequence
  Description of Artificial Sequence: Synthetic peptide
  XENP019647 vhCDR2
YASHRYT

SEQ ID NO: 15849 - protein, 9 aa, Artificial Sequence
  Description of Artificial Sequence: Synthetic peptide
  XENP019647 vhCDR3
QQDFSSPRT

SEQ ID NO: 15850 - protein, 5 aa, Artificial Sequence
  Description of Artificial Sequence: Synthetic peptide
  XENP019647 vlCDR1
NYWMN

SEQ ID NO: 15851 - protein, 19 aa, Artificial Sequence
  Description of Artificial Sequence: Synthetic peptide
  XENP019647 vlCDR2
EIRLYSNNYATHYAESVKG

SEQ ID NO: 15852 - protein, 11 aa, Artificial Sequence
  Description of Artificial Sequence: Synthetic peptide
  XENP019647 vlCDR3
YYGNYGGYFDV

SEQ ID NO: 15853 - protein, 249 aa, Artificial Sequence
  Description of Artificial Sequence: Synthetic polypeptide
  XENP019648 1G6_L1.189_H1.284_scFv(GKPGS)4
EIVLTQSPATLSVSPGERVTLTCRASQSVGNDVAWYQQKPGQAPRLLINYASHRYTGVPDRFTGSGYGTEFTLTISSVQSEDFAVYYCQQDFSSPRTFGGGTKVEIKGKPGSGKPGSGKPGSGKPGSEVQLVESGGGLVKPGGSLRLSCVASGFTFSNYWMNWVRQAPGKGLEWVCEIRLYSNNYATHYAESVKGRFTCSRDDSKSTLYLQMNNLKTEDTGVYYCTRYYGNYGGYFDVWGRGTLVTVSS

SEQ ID NO: 15854 - protein, 107 aa, Artificial Sequence; identical to SEQ ID NO: 15540
  Description of Artificial Sequence: Synthetic polypeptide
  VH of XENP019648

SEQ ID NO: 15855 - protein, 122 aa, Artificial Sequence; identical to SEQ ID NO: 15629
  Description of Artificial Sequence: Synthetic polypeptide
  VL of XENP019648

SEQ ID NO: 15856 - protein, 11 aa, Artificial Sequence
  Description of Artificial Sequence: Synthetic peptide
  XENP019648 vhCDR1
RASQSVGNDVA

SEQ ID NO: 15857 - protein, 7 aa, Artificial Sequence
  Description of Artificial Sequence: Synthetic peptide
  XENP019648 vhCDR2
YASHRYT

SEQ ID NO: 15858 - protein, 9 aa, Artificial Sequence
  Description of Artificial Sequence: Synthetic peptide
  XENP019648 vhCDR3
QQDFSSPRT

SEQ ID NO: 15859 - protein, 5 aa, Artificial Sequence
  Description of Artificial Sequence: Synthetic peptide
  XENP019648 vlCDR1
NYWMN

SEQ ID NO: 15860 - protein, 19 aa, Artificial Sequence
  Description of Artificial Sequence: Synthetic peptide
  XENP019648 vlCDR2
EIRLYSNNYATHYAESVKG

SEQ ID NO: 15861 - protein, 11 aa, Artificial Sequence
  Description of Artificial Sequence: Synthetic peptide
  XENP019648 vlCDR3
YYGNYGGYFDV

SEQ ID NO: 15862 - protein, 249 aa, Artificial Sequence
  Description of Artificial Sequence: Synthetic polypeptide
  XENP019649 1G6_L1.189_H1.285_scFv(GKPGS)4
EIVLTQSPATLSVSPGERVTLTCRASQSVGNDVAWYQQKPGQAPRLLINYASHRYTGVPDRFTGSGYGTEFTLTISSVQSEDFAVYYCQQDFSSPRTFGGGTKVEIKGKPGSGKPGSGKPGSGKPGSEVQLVESGGGLVKPGGSLRLTCVASGFTFSNYWMNWVRQAPGKGLEWVCEIRLYSNNYATHYAESVKGRFTCSRDDSKSMLYLQMNNLKTEDTGVYYCTRYYGNYGGYFDVWGRGTLVTVSS

SEQ ID NO: 15863 - protein, 107 aa, Artificial Sequence; identical to SEQ ID NO: 15540
  Description of Artificial Sequence: Synthetic polypeptide
  VH of XENP019649

SEQ ID NO: 15864 - protein, 122 aa, Artificial Sequence; identical to SEQ ID NO: 15638
  Description of Artificial Sequence: Synthetic polypeptide
  VL of XENP019649

SEQ ID NO: 15865 - protein, 11 aa, Artificial Sequence
  Description of Artificial Sequence: Synthetic peptide
  XENP019649 vhCDR1
RASQSVGNDVA

SEQ ID NO: 15866 - protein, 7 aa, Artificial Sequence
  Description of Artificial Sequence: Synthetic peptide
  XENP019649 vhCDR2
YASHRYT

SEQ ID NO: 15867 - protein, 9 aa, Artificial Sequence
  Description of Artificial Sequence: Synthetic peptide
  XENP019649 vhCDR3
QQDFSSPRT

SEQ ID NO: 15868 - protein, 5 aa, Artificial Sequence
  Description of Artificial Sequence: Synthetic peptide
  XENP019649 vlCDR1
NYWMN

SEQ ID NO: 15869 - protein, 19 aa, Artificial Sequence
  Description of Artificial Sequence: Synthetic peptide
  XENP019649 vlCDR2
EIRLYSNNYATHYAESVKG

SEQ ID NO: 15870 - protein, 11 aa, Artificial Sequence
  Description of Artificial Sequence: Synthetic peptide
  XENP019649 vlCDR3
YYGNYGGYFDV

SEQ ID NO: 15871 - protein, 249 aa, Artificial Sequence
  Description of Artificial Sequence: Synthetic polypeptide
  XENP019650 1G6_L1.192_H1.278_scFv(GKPGS)4
EIVLTQSPATLSASPGERVTLTCRASQSVGNDVAWYQQKPGQAPRLLINYASHRYTGVPDRFTGSGYGTEFTLTISSVQSEDFAVYYCQQDFSSPRTFGGGTKVEIKGKPGSGKPGSGKPGSGKPGSEVQLVESGGGLVKPGGSLRLSCVASGFTFSNYWMNWVRQAPGKGLEWVAEIRLYSNNYATHYAESVKGRFTISRDDSKSTLYLQMNNLKTEDTGVYYCTRYYGNYGGYFDVWGQGTLVTVSS

SEQ ID NO: 15872 - protein, 107 aa, Artificial Sequence; identical to SEQ ID NO: 15657
  Description of Artificial Sequence: Synthetic polypeptide
  VH of XENP019650

SEQ ID NO: 15873 - protein, 122 aa, Artificial Sequence; identical to SEQ ID NO: 15521
  Description of Artificial Sequence: Synthetic polypeptide
  VL of XENP019650

SEQ ID NO: 15874 - protein, 11 aa, Artificial Sequence
  Description of Artificial Sequence: Synthetic peptide
  XENP019650 vhCDR1
RASQSVGNDVA

SEQ ID NO: 15875 - protein, 7 aa, Artificial Sequence
  Description of Artificial Sequence: Synthetic peptide
  XENP019650 vhCDR2
YASHRYT

SEQ ID NO: 15876 - protein, 9 aa, Artificial Sequence
  Description of Artificial Sequence: Synthetic peptide
  XENP019650 vhCDR3
QQDFSSPRT

SEQ ID NO: 15877 - protein, 5 aa, Artificial Sequence
  Description of Artificial Sequence: Synthetic peptide
  XENP019650 vlCDR1
NYWMN

SEQ ID NO: 15878 - protein, 19 aa, Artificial Sequence
  Description of Artificial Sequence: Synthetic peptide
  XENP019650 vlCDR2
EIRLYSNNYATHYAESVKG

SEQ ID NO: 15879 - protein, 11 aa, Artificial Sequence
  Description of Artificial Sequence: Synthetic peptide
  XENP019650 vlCDR3
YYGNYGGYFDV

SEQ ID NO: 15880 - protein, 249 aa, Artificial Sequence
  Description of Artificial Sequence: Synthetic polypeptide
  XENP019651 1G6_L1.193_H1.278_scFv(GKPGS)4
EIVLTQSPATLSVSPGERVTLTCRASQSVGNDVAWYQQKPGQAPRLLINYASHRYTGVPDRFTGSGYGTEFTLTISSVQSEDFGVYYCQQDFSSPRTFGGGTKVEIKGKPGSGKPGSGKPGSGKPGSEVQLVESGGGLVKPGGSLRLSCVASGFTFSNYWMNWVRQAPGKGLEWVAEIRLYSNNYATHYAESVKGRFTISRDDSKSTLYLQMNNLKTEDTGVYYCTRYYGNYGGYFDVWGQGTLVTVSS

SEQ ID NO: 15881 - protein, 107 aa, Artificial Sequence; identical to SEQ ID NO: 15666
  Description of Artificial Sequence: Synthetic polypeptide
  VH of XENP019651

SEQ ID NO: 15882 - protein, 122 aa, Artificial Sequence; identical to SEQ ID NO: 15521
  Description of Artificial Sequence: Synthetic polypeptide
  VL of XENP019651

SEQ ID NO: 15883 - protein, 11 aa, Artificial Sequence
  Description of Artificial Sequence: Synthetic peptide
  XENP019651 vhCDR1
RASQSVGNDVA

SEQ ID NO: 15884 - protein, 7 aa, Artificial Sequence
  Description of Artificial Sequence: Synthetic peptide
  XENP019651 vhCDR2
YASHRYT

SEQ ID NO: 15885 - protein, 9 aa, Artificial Sequence
  Description of Artificial Sequence: Synthetic peptide
  XENP019651 vhCDR3
QQDFSSPRT

SEQ ID NO: 15886 - protein, 5 aa, Artificial Sequence
  Description of Artificial Sequence: Synthetic peptide
  XENP019651 vlCDR1
NYWMN

SEQ ID NO: 15887 - protein, 19 aa, Artificial Sequence
  Description of Artificial Sequence: Synthetic peptide
  XENP019651 vlCDR2
EIRLYSNNYATHYAESVKG

SEQ ID NO: 15888 - protein, 11 aa, Artificial Sequence
  Description of Artificial Sequence: Synthetic peptide
  XENP019651 vlCDR3
YYGNYGGYFDV

SEQ ID NO: 15889 - protein, 249 aa, Artificial Sequence
  Description of Artificial Sequence: Synthetic polypeptide
  XENP019652 1G6_L1.194_H1.278_scFv(GKPGS)4
EIVLTQSPATLSASPGERVTLTCRASQSVGNDVAWYQQKPGQAPRLLINYASHRYTGVPDRFTGSGYGTEFTLTISSVQSEDFGVYYCQQDFSSPRTFGGGTKVEIKGKPGSGKPGSGKPGSGKPGSEVQLVESGGGLVKPGGSLRLSCVASGFTFSNYWMNWVRQAPGKGLEWVAEIRLYSNNYATHYAESVKGRFTISRDDSKSTLYLQMNNLKTEDTGVYYCTRYYGNYGGYFDVWGQGTLVTVSS

SEQ ID NO: 15890 - protein, 107 aa, Artificial Sequence; identical to SEQ ID NO: 2871
  Description of Artificial Sequence: Synthetic polypeptide
  VH of XENP019652

SEQ ID NO: 15891 - protein, 122 aa, Artificial Sequence; identical to SEQ ID NO: 15521
  Description of Artificial Sequence: Synthetic polypeptide
  VL of XENP019652

SEQ ID NO: 15892 - protein, 11 aa, Artificial Sequence
  Description of Artificial Sequence: Synthetic peptide
  XENP019652 vhCDR1
RASQSVGNDVA

SEQ ID NO: 15893 - protein, 7 aa, Artificial Sequence
  Description of Artificial Sequence: Synthetic peptide
  XENP019652 vhCDR2
YASHRYT

SEQ ID NO: 15894 - protein, 9 aa, Artificial Sequence
  Description of Artificial Sequence: Synthetic peptide
  XENP019652 vhCDR3
QQDFSSPRT

SEQ ID NO: 15895 - protein, 5 aa, Artificial Sequence
  Description of Artificial Sequence: Synthetic peptide
  XENP019652 vlCDR1
NYWMN

SEQ ID NO: 15896 - protein, 19 aa, Artificial Sequence
  Description of Artificial Sequence: Synthetic peptide
  XENP019652 vlCDR2
EIRLYSNNYATHYAESVKG

SEQ ID NO: 15897 - protein, 11 aa, Artificial Sequence
  Description of Artificial Sequence: Synthetic peptide
  XENP019652 vlCDR3
YYGNYGGYFDV

SEQ ID NO: 15898 - protein, 249 aa, Artificial Sequence
  Description of Artificial Sequence: Synthetic polypeptide
  XENP019653 1G6_L1.195_H1.278_scFv(GKPGS)4
EIVLTQSPATLSVSPGERVTLTCRASQSVGNDVAWYQQKPGQAPRLLCNYASHRYTGVPDRFTCSGYGTEFTLTISSVQSEDFAVYYCQQDFSSPRTFGGGTKVEIKGKPGSGKPGSGKPGSGKPGSEVQLVESGGGLVKPGGSLRLSCVASGFTFSNYWMNWVRQAPGKGLEWVAEIRLYSNNYATHYAESVKGRFTISRDDSKSTLYLQMNNLKTEDTGVYYCTRYYGNYGGYFDVWGQGTLVTVSS

SEQ ID NO: 15899 - protein, 107 aa, Artificial Sequence; identical to SEQ ID NO: 15684
  Description of Artificial Sequence: Synthetic polypeptide
  VH of XENP019653

SEQ ID NO: 15900 - protein, 122 aa, Artificial Sequence; identical to SEQ ID NO: 15521
  Description of Artificial Sequence: Synthetic polypeptide
  VL of XENP019653

SEQ ID NO: 15901 - protein, 11 aa, Artificial Sequence
  Description of Artificial Sequence: Synthetic peptide
  XENP019653 vhCDR1
RASQSVGNDVA

SEQ ID NO: 15902 - protein, 9 aa, Artificial Sequence
  Description of Artificial Sequence: Synthetic peptide
  XENP019653 vhCDR2
CNYASHRYT

SEQ ID NO: 15903 - protein, 9 aa, Artificial Sequence
  Description of Artificial Sequence: Synthetic peptide
  XENP019653 vhCDR3
QQDFSSPRT

SEQ ID NO: 15904 - protein, 5 aa, Artificial Sequence
  Description of Artificial Sequence: Synthetic peptide
  XENP019653 vlCDR1
NYWMN

SEQ ID NO: 15905 - protein, 19 aa, Artificial Sequence
  Description of Artificial Sequence: Synthetic peptide
  XENP019653 vlCDR2
EIRLYSNNYATHYAESVKG

SEQ ID NO: 15906 - protein, 11 aa, Artificial Sequence
  Description of Artificial Sequence: Synthetic peptide
  XENP019653 vlCDR3
YYGNYGGYFDV

SEQ ID NO: 15907 - protein, 249 aa, Artificial Sequence
  Description of Artificial Sequence: Synthetic polypeptide
  XENP019654 1G6_L1.196_H1.278_scFv(GKPGS)4
EIVLTQSPATLSASPGERVTLTCRASQSVGNDVAWYQQKPGQAPRLLCNYASHRYTGVPDRFTCSGYGTEFTLTISSVQSEDFGVYYCQQDFSSPRTFGGGTKVEIKGKPGSGKPGSGKPGSGKPGSEVQLVESGGGLVKPGGSLRLSCVASGFTFSNYWMNWVRQAPGKGLEWVAEIRLYSNNYATHYAESVKGRFTISRDDSKSTLYLQMNNLKTEDTGVYYCTRYYGNYGGYFDVWGQGTLVTVSS

SEQ ID NO: 15908 - protein, 107 aa, Artificial Sequence; identical to SEQ ID NO: 15693
  Description of Artificial Sequence: Synthetic polypeptide
  VH of XENP019654

SEQ ID NO: 15909 - protein, 122 aa, Artificial Sequence; identical to SEQ ID NO: 15521
  Description of Artificial Sequence: Synthetic polypeptide
  VL of XENP019654

SEQ ID NO: 15910 - protein, 11 aa, Artificial Sequence
  Description of Artificial Sequence: Synthetic peptide
  XENP019654 vhCDR1
RASQSVGNDVA

SEQ ID NO: 15911 - protein, 9 aa, Artificial Sequence
  Description of Artificial Sequence: Synthetic peptide
  XENP019654 vhCDR2
CNYASHRYT

SEQ ID NO: 15912 - protein, 9 aa, Artificial Sequence
  Description of Artificial Sequence: Synthetic peptide
  XENP019654 vhCDR3
QQDFSSPRT

SEQ ID NO: 15913 - protein, 5 aa, Artificial Sequence
  Description of Artificial Sequence: Synthetic peptide
  XENP019654 vlCDR1
NYWMN

SEQ ID NO: 15914 - protein, 19 aa, Artificial Sequence
  Description of Artificial Sequence: Synthetic peptide
  XENP019654 vlCDR2
EIRLYSNNYATHYAESVKG

SEQ ID NO: 15915 - protein, 11 aa, Artificial Sequence
  Description of Artificial Sequence: Synthetic peptide
  XENP019654 vlCDR3
YYGNYGGYFDV

SEQ ID NO: 15916 - protein, 249 aa, Artificial Sequence
  Description of Artificial Sequence: Synthetic polypeptide
  XENP019655 1G6_L1.197_H1.278_scFv(GKPGS)4
EIVLTQSPATLSASPGERVTLTCRASQSVGNDVAWYQQKPGQAPRLLCNYASHRYTSVPDRFTCSGYGTEFTLTISSVQSEDFGVYYCQQDFSSPRTFGGGTKVEIKGKPGSGKPGSGKPGSGKPGSEVQLVESGGGLVKPGGSLRLSCVASGFTFSNYWMNWVRQAPGKGLEWVAEIRLYSNNYATHYAESVKGRFTISRDDSKSTLYLQMNNLKTEDTGVYYCTRYYGNYGGYFDVWGQGTLVTVSS

SEQ ID NO: 15917 - protein, 107 aa, Artificial Sequence; identical to SEQ ID NO: 15702
  Description of Artificial Sequence: Synthetic polypeptide
  VH of XENP019655

SEQ ID NO: 15918 - protein, 122 aa, Artificial Sequence; identical to SEQ ID NO: 15521
  Description of Artificial Sequence: Synthetic polypeptide
  VL of XENP019655

SEQ ID NO: 15919 - protein, 11 aa, Artificial Sequence
  Description of Artificial Sequence: Synthetic peptide
  XENP019655 vhCDR1
RASQSVGNDVA

SEQ ID NO: 15920 - protein, 9 aa, Artificial Sequence
  Description of Artificial Sequence: Synthetic peptide
  XENP019655 vhCDR2
CNYASHRYT

SEQ ID NO: 15921 - protein, 9 aa, Artificial Sequence
  Description of Artificial Sequence: Synthetic peptide
  XENP019655 vhCDR3
QQDFSSPRT

SEQ ID NO: 15922 - protein, 5 aa, Artificial Sequence
  Description of Artificial Sequence: Synthetic peptide
  XENP019655 vlCDR1
NYWMN

SEQ ID NO: 15923 - protein, 19 aa, Artificial Sequence
  Description of Artificial Sequence: Synthetic peptide
  XENP019655 vlCDR2
EIRLYSNNYATHYAESVKG

SEQ ID NO: 15924 - protein, 11 aa, Artificial Sequence
  Description of Artificial Sequence: Synthetic peptide
  XENP019655 vlCDR3
YYGNYGGYFDV

SEQ ID NO: 15925 - protein, 249 aa, Artificial Sequence
  Description of Artificial Sequence: Synthetic polypeptide
  XENP019656 1G6_H1.278_L1.189_scFv_linkerV1
EVQLVESGGGLVKPGGSLRLSCVASGFTFSNYWMNWVRQAPGKGLEWVAEIRLYSNNYATHYAESVKGRFTISRDDSKSTLYLQMNNLKTEDTGVYYCTRYYGNYGGYFDVWGQGTLVTVSSGKPGSGKPGSGKPGSGGGGSEIVLTQSPATLSVSPGERVTLTCRASQSVGNDVAWYQQKPGQAPRLLINYASHRYTGVPDRFTGSGYGTEFTLTISSVQSEDFAVYYCQQDFSSPRTFGGGTKVEIK

SEQ ID NO: 15926 - protein, 122 aa, Artificial Sequence; identical to SEQ ID NO: 15521
  Description of Artificial Sequence: Synthetic polypeptide
  VH of XENP019656

SEQ ID NO: 15927 - protein, 107 aa, Artificial Sequence; identical to SEQ ID NO: 15540
  Description of Artificial Sequence: Synthetic polypeptide
  VL of XENP019656

SEQ ID NO: 15928 - protein, 5 aa, Artificial Sequence
  Description of Artificial Sequence: Synthetic peptide
  XENP019656 vhCDR1
NYWMN

SEQ ID NO: 15929 - protein, 19 aa, Artificial Sequence
  Description of Artificial Sequence: Synthetic peptide
  XENP019656 vhCDR2
EIRLYSNNYATHYAESVKG

SEQ ID NO: 15930 - protein, 11 aa, Artificial Sequence
  Description of Artificial Sequence: Synthetic peptide
  XENP019656 vhCDR3
YYGNYGGYFDV

SEQ ID NO: 15931 - protein, 11 aa, Artificial Sequence
  Description of Artificial Sequence: Synthetic peptide
  XENP019656 vlCDR1
RASQSVGNDVA

SEQ ID NO: 15932 - protein, 7 aa, Artificial Sequence
  Description of Artificial Sequence: Synthetic peptide
  XENP019656 vlCDR2
YASHRYT

SEQ ID NO: 15933 - protein, 9 aa, Artificial Sequence
  Description of Artificial Sequence: Synthetic peptide
  XENP019656 vlCDR3
QQDFSSPRT

SEQ ID NO: 15934 - protein, 247 aa, Artificial Sequence
  Description of Artificial Sequence: Synthetic polypeptide
  XENP019657 1G6_H1.278_L1.189_scFv_linkerV2
EVQLVESGGGLVKPGGSLRLSCVASGFTFSNYWMNWVRQAPGKGLEWVAEIRLYSNNYATHYAESVKGRFTISRDDSKSTLYLQMNNLKTEDTGVYYCTRYYGNYGGYFDVWGQGTLVTVSSGKPGSGKPGSGKPGSGKPEIVLTQSPATLSVSPGERVTLTCRASQSVGNDVAWYQQKPGQAPRLLINYASHRYTGVPDRFTGSGYGTEFTLTISSVQSEDFAVYYCQQDFSSPRTFGGGTKVEIK

SEQ ID NO: 15935 - protein, 122 aa, Artificial Sequence; identical to SEQ ID NO: 15521
  Description of Artificial Sequence: Synthetic polypeptide
  VH of XENP019657

SEQ ID NO: 15936 - protein, 107 aa, Artificial Sequence; identical to SEQ ID NO: 15540
  Description of Artificial Sequence: Synthetic polypeptide
  VL of XENP019657

SEQ ID NO: 15937 - protein, 5 aa, Artificial Sequence
  Description of Artificial Sequence: Synthetic peptide
  XENP019657 vhCDR1
NYWMN

SEQ ID NO: 15938 - protein, 19 aa, Artificial Sequence
  Description of Artificial Sequence: Synthetic peptide
  XENP019657 vhCDR2
EIRLYSNNYATHYAESVKG

SEQ ID NO: 15939 - protein, 11 aa, Artificial Sequence
  Description of Artificial Sequence: Synthetic peptide
  XENP019657 vhCDR3
YYGNYGGYFDV

SEQ ID NO: 15940 - protein, 11 aa, Artificial Sequence
  Description of Artificial Sequence: Synthetic peptide
  XENP019657 vlCDR1
RASQSVGNDVA

SEQ ID NO: 15941 - protein, 7 aa, Artificial Sequence
  Description of Artificial Sequence: Synthetic peptide
  XENP019657 vlCDR2
YASHRYT

SEQ ID NO: 15942 - protein, 9 aa, Artificial Sequence
  Description of Artificial Sequence: Synthetic peptide
  XENP019657 vlCDR3
QQDFSSPRT

SEQ ID NO: 15943 - protein, 244 aa, Artificial Sequence
  Description of Artificial Sequence: Synthetic polypeptide
  XENP019658 1G6_H1.278_L1.189_scFv_linkerV3
EVQLVESGGGLVKPGGSLRLSCVASGFTFSNYWMNWVRQAPGKGLEWVAEIRLYSNNYATHYAESVKGRFTISRDDSKSTLYLQMNNLKTEDTGVYYCTRYYGNYGGYFDVWGQGTLVTVSSGKPGSGKPGSGKPGSEIVLTQSPATLSVSPGERVTLTCRASQSVGNDVAWYQQKPGQAPRLLINYASHRYTGVPDRFTGSGYGTEFTLTISSVQSEDFAVYYCQQDFSSPRTFGGGTKVEIK

SEQ ID NO: 15944 - protein, 122 aa, Artificial Sequence; identical to SEQ ID NO: 15521
  Description of Artificial Sequence: Synthetic polypeptide
  VH of XENP019658

SEQ ID NO: 15945 - protein, 107 aa, Artificial Sequence; identical to SEQ ID NO: 15540
  Description of Artificial Sequence: Synthetic polypeptide
  VL of XENP019658

SEQ ID NO: 15946 - protein, 5 aa, Artificial Sequence
  Description of Artificial Sequence: Synthetic peptide
  XENP019658 vhCDR1
NYWMN

SEQ ID NO: 15947 - protein, 19 aa, Artificial Sequence
  Description of Artificial Sequence: Synthetic peptide
  XENP019658 vhCDR2
EIRLYSNNYATHYAESVKG

SEQ ID NO: 15948 - protein, 11 aa, Artificial Sequence
  Description of Artificial Sequence: Synthetic peptide
  XENP019658 vhCDR3
YYGNYGGYFDV

SEQ ID NO: 15949 - protein, 11 aa, Artificial Sequence
  Description of Artificial Sequence: Synthetic peptide
  XENP019658 vlCDR1
RASQSVGNDVA

SEQ ID NO: 15950 - protein, 7 aa, Artificial Sequence
  Description of Artificial Sequence: Synthetic peptide
  XENP019658 vlCDR2
YASHRYT

SEQ ID NO: 15951 - protein, 9 aa, Artificial Sequence
  Description of Artificial Sequence: Synthetic peptide
  XENP019658 vlCDR3
QQDFSSPRT

SEQ ID NO: 15952 - protein, 251 aa, Artificial Sequence
  Description of Artificial Sequence: Synthetic polypeptide
  XENP019659 1G6_H1.278_L1.189_scFv_linkerV4
EVQLVESGGGLVKPGGSLRLSCVASGFTFSNYWMNWVRQAPGKGLEWVAEIRLYSNNYATHYAESVKGRFTISRDDSKSTLYLQMNNLKTEDTGVYYCTRYYGNYGGYFDVWGQGTLVTVSSGKPGSGKPGSGKPGSGKPGSGSEIVLTQSPATLSVSPGERVTLTCRASQSVGNDVAWYQQKPGQAPRLLINYASHRYTGVPDRFTGSGYGTEFTLTISSVQSEDFAVYYCQQDFSSPRTFGGGTKVEIK

SEQ ID NO: 15953 - protein, 122 aa, Artificial Sequence; identical to SEQ ID NO: 15521
  Description of Artificial Sequence: Synthetic polypeptide
  VH of XENP019659

SEQ ID NO: 15954 - protein, 107 aa, Artificial Sequence; identical to SEQ ID NO: 15540
  Description of Artificial Sequence: Synthetic polypeptide
  VL of XENP019659

SEQ ID NO: 15955 - protein, 5 aa, Artificial Sequence
  Description of Artificial Sequence: Synthetic peptide
  XENP019659 vhCDR1
NYWMN

SEQ ID NO: 15956 - protein, 19 aa, Artificial Sequence
  Description of Artificial Sequence: Synthetic peptide
  XENP019659 vhCDR2
EIRLYSNNYATHYAESVKG

SEQ ID NO: 15957 - protein, 11 aa, Artificial Sequence
  Description of Artificial Sequence: Synthetic peptide
  XENP019659 vhCDR3
YYGNYGGYFDV

SEQ ID NO: 15958 - protein, 11 aa, Artificial Sequence
  Description of Artificial Sequence: Synthetic peptide
  XENP019659 vlCDR1
RASQSVGNDVA

SEQ ID NO: 15959 - protein, 7 aa, Artificial Sequence
  Description of Artificial Sequence: Synthetic peptide
  XENP019659 vlCDR2
YASHRYT

SEQ ID NO: 15960 - protein, 9 aa, Artificial Sequence
  Description of Artificial Sequence: Synthetic peptide
  XENP019659 vlCDR3
QQDFSSPRT

SEQ ID NO: 15961 - protein, 252 aa, Artificial Sequence
  Description of Artificial Sequence: Synthetic polypeptide
  XENP019660 1G6_H1.278_L1.189_scFv_linkerV5
EVQLVESGGGLVKPGGSLRLSCVASGFTFSNYWMNWVRQAPGKGLEWVAEIRLYSNNYATHYAESVKGRFTISRDDSKSTLYLQMNNLKTEDTGVYYCTRYYGNYGGYFDVWGQGTLVTVSSGKPGSGKPGSGKPGSGKPGSGGSEIVLTQSPATLSVSPGERVTLTCRASQSVGNDVAWYQQKPGQAPRLLINYASHRYTGVPDRFTGSGYGTEFTLTISSVQSEDFAVYYCQQDFSSPRTFGGGTKVEIK

SEQ ID NO: 15962 - protein, 122 aa, Artificial Sequence; identical to SEQ ID NO: 15521
  Description of Artificial Sequence: Synthetic polypeptide
  VH of XENP019660

SEQ ID NO: 15963 - protein, 108 aa, Artificial Sequence
  Description of Artificial Sequence: Synthetic polypeptide
  VL of XENP019660
SEIVLTQSPATLSVSPGERVTLTCRASQSVGNDVAWYQQKPGQAPRLLINYASHRYTGVPDRFTGSGYGTEFTLTISSVQSEDFAVYYCQQDFSSPRTFGGGTKVEIK

SEQ ID NO: 15964 - protein, 5 aa, Artificial Sequence
  Description of Artificial Sequence: Synthetic peptide
  XENP019660 vhCDR1
NYWMN

SEQ ID NO: 15965 - protein, 19 aa, Artificial Sequence
  Description of Artificial Sequence: Synthetic peptide
  XENP019660 vhCDR2
EIRLYSNNYATHYAESVKG

SEQ ID NO: 15966 - protein, 11 aa, Artificial Sequence
  Description of Artificial Sequence: Synthetic peptide
  XENP019660 vhCDR3
YYGNYGGYFDV

SEQ ID NO: 15967 - protein, 11 aa, Artificial Sequence
  Description of Artificial Sequence: Synthetic peptide
  XENP019660 vlCDR1
RASQSVGNDVA

SEQ ID NO: 15968 - protein, 7 aa, Artificial Sequence
  Description of Artificial Sequence: Synthetic peptide
  XENP019660 vlCDR2
YASHRYT

SEQ ID NO: 15969 - protein, 9 aa, Artificial Sequence
  Description of Artificial Sequence: Synthetic peptide
  XENP019660 vlCDR3
QQDFSSPRT

SEQ ID NO: 15970 - protein, 253 aa, Artificial Sequence
  Description of Artificial Sequence: Synthetic polypeptide
  XENP019661 1G6_H1.278_L1.189_scFv_linkerV6
EVQLVESGGGLVKPGGSLRLSCVASGFTFSNYWMNWVRQAPGKGLEWVAEIRLYSNNYATHYAESVKGRFTISRDDSKSTLYLQMNNLKTEDTGVYYCTRYYGNYGGYFDVWGQGTLVTVSSGKPGSGKPGSGKPGSGKPGSGGGSEIVLTQSPATLSVSPGERVTLTCRASQSVGNDVAWYQQKPGQAPRLLINYASHRYTGVPDRFTGSGYGTEFTLTISSVQSEDFAVYYCQQDFSSPRTFGGGTKVEIK

SEQ ID NO: 15971 - protein, 122 aa, Artificial Sequence; identical to SEQ ID NO: 15521
  Description of Artificial Sequence: Synthetic polypeptide
  VH of XENP019661

SEQ ID NO: 15972 - protein, 107 aa, Artificial Sequence; identical to SEQ ID NO: 15540
  Description of Artificial Sequence: Synthetic polypeptide
  VL of XENP019661

SEQ ID NO: 15973 - protein, 5 aa, Artificial Sequence
  Description of Artificial Sequence: Synthetic peptide
  XENP019661 vhCDR1
NYWMN

SEQ ID NO: 15974 - protein, 19 aa, Artificial Sequence
  Description of Artificial Sequence: Synthetic peptide
  XENP019661 vhCDR2
EIRLYSNNYATHYAESVKG

SEQ ID NO: 15975 - protein, 11 aa, Artificial Sequence
  Description of Artificial Sequence: Synthetic peptide
  XENP019661 vhCDR3
YYGNYGGYFDV

SEQ ID NO: 15976 - protein, 11 aa, Artificial Sequence
  Description of Artificial Sequence: Synthetic peptide
  XENP019661 vlCDR1
RASQSVGNDVA

SEQ ID NO: 15977 - protein, 7 aa, Artificial Sequence
  Description of Artificial Sequence: Synthetic peptide
  XENP019661 vlCDR2
YASHRYT

SEQ ID NO: 15978 - protein, 9 aa, Artificial Sequence
  Description of Artificial Sequence: Synthetic peptide
  XENP019661 vlCDR3
QQDFSSPRT

SEQ ID NO: 15979 - protein, 254 aa, Artificial Sequence
  Description of Artificial Sequence: Synthetic polypeptide
  XENP019662 1G6_H1.278_L1.189_scFv_linkerV7
EVQLVESGGGLVKPGGSLRLSCVASGFTFSNYWMNWVRQAPGKGLEWVAEIRLYSNNYATHYAESVKGRFTISRDDSKSTLYLQMNNLKTEDTGVYYCTRYYGNYGGYFDVWGQGTLVTVSSGKPGSGKPGSGKPGSGKPGSGGGGSEIVLTQSPATLSVSPGERVTLTCRASQSVGNDVAWYQQKPGQAPRLLINYASHRYTGVPDRFTGSGYGTEFTLTISSVQSEDFAVYYCQQDFSSPRTFGGGTKVEIK

SEQ ID NO: 15980 - protein, 122 aa, Artificial Sequence; identical to SEQ ID NO: 15521
  Description of Artificial Sequence: Synthetic polypeptide
  VH of XENP019662

SEQ ID NO: 15981 - protein, 107 aa, Artificial Sequence; identical to SEQ ID NO: 15540
  Description of Artificial Sequence: Synthetic polypeptide
  VL of XENP019662

SEQ ID NO: 15982 - protein, 5 aa, Artificial Sequence
  Description of Artificial Sequence: Synthetic peptide
  XENP019662 vhCDR1
NYWMN

SEQ ID NO: 15983 - protein, 19 aa, Artificial Sequence
  Description of Artificial Sequence: Synthetic peptide
  XENP019662 vhCDR2
EIRLYSNNYATHYAESVKG

SEQ ID NO: 15984 - protein, 11 aa, Artificial Sequence
  Description of Artificial Sequence: Synthetic peptide
  XENP019662 vhCDR3
YYGNYGGYFDV

SEQ ID NO: 15985 - protein, 11 aa, Artificial Sequence
  Description of Artificial Sequence: Synthetic peptide
  XENP019662 vlCDR1
RASQSVGNDVA

SEQ ID NO: 15986 - protein, 7 aa, Artificial Sequence
  Description of Artificial Sequence: Synthetic peptide
  XENP019662 vlCDR2
YASHRYT

SEQ ID NO: 15987 - protein, 9 aa, Artificial Sequence
  Description of Artificial Sequence: Synthetic peptide
  XENP019662 vlCDR3
QQDFSSPRT

SEQ ID NO: 15988 - protein, 242 aa, Artificial Sequence
  Description of Artificial Sequence: Synthetic polypeptide
  XENP019663 1G6_H1.278_L1.189_scFv_linkerV8
EVQLVESGGGLVKPGGSLRLSCVASGFTFSNYWMNWVRQAPGKGLEWVAEIRLYSNNYATHYAESVKGRFTISRDDSKSTLYLQMNNLKTEDTGVYYCTRYYGNYGGYFDVWGQGTLVTVSSGKPGSGKPGSGKPEIVLTQSPATLSVSPGERVTLTCRASQSVGNDVAWYQQKPGQAPRLLINYASHRYTGVPDRFTGSGYGTEFTLTISSVQSEDFAVYYCQQDFSSPRTFGGGTKVEIK

SEQ ID NO: 15989 - protein, 122 aa, Artificial Sequence; identical to SEQ ID NO: 15521
  Description of Artificial Sequence: Synthetic polypeptide
  VH of XENP019663

SEQ ID NO: 15990 - protein, 107 aa, Artificial Sequence; identical to SEQ ID NO: 15540
  Description of Artificial Sequence: Synthetic polypeptide
  VL of XENP019663

SEQ ID NO: 15991 - protein, 5 aa, Artificial Sequence
  Description of Artificial Sequence: Synthetic peptide
  XENP019663 vhCDR1
NYWMN

SEQ ID NO: 15992 - protein, 19 aa, Artificial Sequence
  Description of Artificial Sequence: Synthetic peptide
  XENP019663 vhCDR2
EIRLYSNNYATHYAESVKG

SEQ ID NO: 15993 - protein, 11 aa, Artificial Sequence
  Description of Artificial Sequence: Synthetic peptide
  XENP019663 vhCDR3
YYGNYGGYFDV

SEQ ID NO: 15994 - protein, 11 aa, Artificial Sequence
  Description of Artificial Sequence: Synthetic peptide
  XENP019663 vlCDR1
RASQSVGNDVA

SEQ ID NO: 15995 - protein, 7 aa, Artificial Sequence
  Description of Artificial Sequence: Synthetic peptide
  XENP019663 vlCDR2
YASHRYT

SEQ ID NO: 15996 - protein, 9 aa, Artificial Sequence
  Description of Artificial Sequence: Synthetic peptide
  XENP019663 vlCDR3
QQDFSSPRT

SEQ ID NO: 15997 - protein, 249 aa, Artificial Sequence
  Description of Artificial Sequence: Synthetic polypeptide
  XENP019664 1G6_H1.287_L1.209_scFv(GKPGS)4
EVQLVESGGGLVKPGGSLRLSCVASGFTFSNYWMNWVRQAPGKCLEWVAEIRLYSNNYATHYAESVKGRFTISRDDSKSTLYLQMNNLKTEDTGVYYCTRYYGNYGGYFDVWGQGTLVTVSSGKPGSGKPGSGKPGSGKPGSEIVLTQSPATLSVSPGERVTLTCRASQSVGNDVAWYQQKPGQAPRLLINYASHRYTGVPDRFTGSGYGTEFTLTISSVQSEDFAVYYCQQDFSSPRTFGCGTKVEIK

SEQ ID NO: 15998 - protein, 122 aa, Artificial Sequence
  Description of Artificial Sequence: Synthetic polypeptide
  VH of XENP019664
EVQLVESGGGLVKPGGSLRLSCVASGFTFSNYWMNWVRQAPGKCLEWVAEIRLYSNNYATHYAESVKGRFTISRDDSKSTLYLQMNNLKTEDTGVYYCTRYYGNYGGYFDVWGQGTLVTVSS

SEQ ID NO: 15999 - protein, 107 aa, Artificial Sequence
  Description of Artificial Sequence: Synthetic polypeptide
  VL of XENP019664
EIVLTQSPATLSVSPGERVTLTCRASQSVGNDVAWYQQKPGQAPRLLINYASHRYTGVPDRFTGSGYGTEFTLTISSVQSEDFAVYYCQQDFSSPRTFGCGTKVEIK

SEQ ID NO: 16000 - protein, 5 aa, Artificial Sequence
  Description of Artificial Sequence: Synthetic peptide
  XENP019664 vhCDR1
NYWMN

SEQ ID NO: 16001 - protein, 19 aa, Artificial Sequence
  Description of Artificial Sequence: Synthetic peptide
  XENP019664 vhCDR2
EIRLYSNNYATHYAESVKG

SEQ ID NO: 16002 - protein, 11 aa, Artificial Sequence
  Description of Artificial Sequence: Synthetic peptide
  XENP019664 vhCDR3
YYGNYGGYFDV

SEQ ID NO: 16003 - protein, 11 aa, Artificial Sequence
  Description of Artificial Sequence: Synthetic peptide
  XENP019664 vlCDR1
RASQSVGNDVA

SEQ ID NO: 16004 - protein, 7 aa, Artificial Sequence
  Description of Artificial Sequence: Synthetic peptide
  XENP019664 vlCDR2
YASHRYT

SEQ ID NO: 16005 - protein, 9 aa, Artificial Sequence
  Description of Artificial Sequence: Synthetic peptide
  XENP019664 vlCDR3
QQDFSSPRT

SEQ ID NO: 16006 - protein, 249 aa, Artificial Sequence
  Description of Artificial Sequence: Synthetic polypeptide
  XENP019665 1G6_L1.209_H1.287_scFv(GKPGS)4
EIVLTQSPATLSVSPGERVTLTCRASQSVGNDVAWYQQKPGQAPRLLINYASHRYTGVPDRFTGSGYGTEFTLTISSVQSEDFAVYYCQQDFSSPRTFGCGTKVEIKGKPGSGKPGSGKPGSGKPGSEVQLVESGGGLVKPGGSLRLSCVASGFTFSNYWMNWVRQAPGKCLEWVAEIRLYSNNYATHYAESVKGRFTISRDDSKSTLYLQMNNLKTEDTGVYYCTRYYGNYGGYFDVWGQGTLVTVSS

SEQ ID NO: 16007 - protein, 107 aa, Artificial Sequence; identical to SEQ ID NO: 15999
  Description of Artificial Sequence: Synthetic polypeptide
  VH of XENP019665

SEQ ID NO: 16008 - protein, 122 aa, Artificial Sequence; identical to SEQ ID NO: 15998
  Description of Artificial Sequence: Synthetic polypeptide
  VL of XENP019665

SEQ ID NO: 16009 - protein, 11 aa, Artificial Sequence
  Description of Artificial Sequence: Synthetic peptide
  XENP019665 vhCDR1
RASQSVGNDVA

SEQ ID NO: 16010 - protein, 7 aa, Artificial Sequence
  Description of Artificial Sequence: Synthetic peptide
  XENP019665 vhCDR2
YASHRYT

SEQ ID NO: 16011 - protein, 9 aa, Artificial Sequence
  Description of Artificial Sequence: Synthetic peptide
  XENP019665 vhCDR3
QQDFSSPRT

SEQ ID NO: 16012 - protein, 5 aa, Artificial Sequence
  Description of Artificial Sequence: Synthetic peptide
  XENP019665 vlCDR1
NYWMN

SEQ ID NO: 16013 - protein, 19 aa, Artificial Sequence
  Description of Artificial Sequence: Synthetic peptide
  XENP019665 vlCDR2
EIRLYSNNYATHYAESVKG

SEQ ID NO: 16014 - protein, 11 aa, Artificial Sequence
  Description of Artificial Sequence: Synthetic peptide
  XENP019665 vlCDR3
YYGNYGGYFDV

SEQ ID NO: 16015 - protein, 249 aa, Artificial Sequence
  Description of Artificial Sequence: Synthetic polypeptide
  XENP019666 1G6_H1.284_L1.194_scFv(GKPGS)4
EVQLVESGGGLVKPGGSLRLSCVASGFTFSNYWMNWVRQAPGKGLEWVCEIRLYSNNYATHYAESVKGRFTCSRDDSKSTLYLQMNNLKTEDTGVYYCTRYYGNYGGYFDVWGRGTLVTVSSGKPGSGKPGSGKPGSGKPGSEIVLTQSPATLSASPGERVTLTCRASQSVGNDVAWYQQKPGQAPRLLINYASHRYTGVPDRFTGSGYGTEFTLTISSVQSEDFGVYYCQQDFSSPRTFGGGTKVEIK

SEQ ID NO: 16016 - protein, 122 aa, Artificial Sequence; identical to SEQ ID NO: 15629
  Description of Artificial Sequence: Synthetic polypeptide
  VH of XENP019666

SEQ ID NO: 16017 - protein, 107 aa, Artificial Sequence; identical to SEQ ID NO: 2871
  Description of Artificial Sequence: Synthetic polypeptide
  VL of XENP019666

SEQ ID NO: 16018 - protein, 5 aa, Artificial Sequence
  Description of Artificial Sequence: Synthetic peptide
  XENP019666 vhCDR1
NYWMN

SEQ ID NO: 16019 - protein, 19 aa, Artificial Sequence
  Description of Artificial Sequence: Synthetic peptide
  XENP019666 vhCDR2
EIRLYSNNYATHYAESVKG

SEQ ID NO: 16020 - protein, 11 aa, Artificial Sequence
  Description of Artificial Sequence: Synthetic peptide
  XENP019666 vhCDR3
YYGNYGGYFDV

SEQ ID NO: 16021 - protein, 11 aa, Artificial Sequence
  Description of Artificial Sequence: Synthetic peptide
  XENP019666 vlCDR1
RASQSVGNDVA

SEQ ID NO: 16022 - protein, 7 aa, Artificial Sequence
  Description of Artificial Sequence: Synthetic peptide
  XENP019666 vlCDR2
YASHRYT

SEQ ID NO: 16023 - protein, 9 aa, Artificial Sequence
  Description of Artificial Sequence: Synthetic peptide
  XENP019666 vlCDR3
QQDFSSPRT

SEQ ID NO: 16024 - protein, 249 aa, Artificial Sequence
  Description of Artificial Sequence: Synthetic polypeptide
  XENP019667 1G6_L1.194_H1.284_scFv(GKPGS)4
EIVLTQSPATLSASPGERVTLTCRASQSVGNDVAWYQQKPGQAPRLLINYASHRYTGVPDRFTGSGYGTEFTLTISSVQSEDFGVYYCQQDFSSPRTFGGGTKVEIKGKPGSGKPGSGKPGSGKPGSEVQLVESGGGLVKPGGSLRLSCVASGFTFSNYWMNWVRQAPGKGLEWVCEIRLYSNNYATHYAESVKGRFTCSRDDSKSTLYLQMNNLKTEDTGVYYCTRYYGNYGGYFDVWGRGTLVTVSS

SEQ ID NO: 16025 - protein, 107 aa, Artificial Sequence; identical to SEQ ID NO: 2871
  Description of Artificial Sequence: Synthetic polypeptide
  VH of XENP019667

SEQ ID NO: 16026 - protein, 122 aa, Artificial Sequence; identical to SEQ ID NO: 15629
  Description of Artificial Sequence: Synthetic polypeptide
  VL of XENP019667

SEQ ID NO: 16027 - protein, 11 aa, Artificial Sequence
  Description of Artificial Sequence: Synthetic peptide
  XENP019667 vhCDR1
RASQSVGNDVA

SEQ ID NO: 16028 - protein, 7 aa, Artificial Sequence
  Description of Artificial Sequence: Synthetic peptide
  XENP019667 vhCDR2
YASHRYT

SEQ ID NO: 16029 - protein, 9 aa, Artificial Sequence
  Description of Artificial Sequence: Synthetic peptide
  XENP019667 vhCDR3
QQDFSSPRT

SEQ ID NO: 16030 - protein, 5 aa, Artificial Sequence
  Description of Artificial Sequence: Synthetic peptide
  XENP019667 vlCDR1
NYWMN

SEQ ID NO: 16031 - protein, 19 aa, Artificial Sequence
  Description of Artificial Sequence: Synthetic peptide
  XENP019667 vlCDR2
EIRLYSNNYATHYAESVKG

SEQ ID NO: 16032 - protein, 11 aa, Artificial Sequence
  Description of Artificial Sequence: Synthetic peptide
  XENP019667 vlCDR3
YYGNYGGYFDV

SEQ ID NO: 16033 - protein, 249 aa, Artificial Sequence
  Description of Artificial Sequence: Synthetic polypeptide
  XENP019668 1G6_H1.288_L1.210_scFv(GKPGS)4
EVQLVESGGGLVKPGGSLRLSCVASGFTFSNYWMNWVRQAPGKCLEWVAEIRLYSNNYATHYAESVKGRFTISRDDSKSTLYLQMNNLKTEDTGVYYCTRYYGNYGGYFDVWGRGTLVTVSSGKPGSGKPGSGKPGSGKPGSEIVLTQSPATLSASPGERVTLTCRASQSVGNDVAWYQQKPGQAPRLLINYASHRYTGVPDRFTGSGYGTEFTLTISSVQSEDFGVYYCQQDFSSPRTFGCGTKVEIK

SEQ ID NO: 16034 - protein, 122 aa, Artificial Sequence
  Description of Artificial Sequence: Synthetic polypeptide
  VH of XENP019668
EVQLVESGGGLVKPGGSLRLSCVASGFTFSNYWMNWVRQAPGKCLEWVAEIRLYSNNYATHYAESVKGRFTISRDDSKSTLYLQMNNLKTEDTGVYYCTRYYGNYGGYFDVWGRGTLVTVSS

SEQ ID NO: 16035 - protein, 107 aa, Artificial Sequence
  Description of Artificial Sequence: Synthetic polypeptide
  VL of XENP019668
EIVLTQSPATLSASPGERVTLTCRASQSVGNDVAWYQQKPGQAPRLLINYASHRYTGVPDRFTGSGYGTEFTLTISSVQSEDFGVYYCQQDFSSPRTFGCGTKVEIK

SEQ ID NO: 16036 - protein, 5 aa, Artificial Sequence
  Description of Artificial Sequence: Synthetic peptide
  XENP019668 vhCDR1
NYWMN

SEQ ID NO: 16037 - protein, 19 aa, Artificial Sequence
  Description of Artificial Sequence: Synthetic peptide
  XENP019668 vhCDR2
EIRLYSNNYATHYAESVKG

SEQ ID NO: 16038 - protein, 11 aa, Artificial Sequence
  Description of Artificial Sequence: Synthetic peptide
  XENP019668 vhCDR3
YYGNYGGYFDV

SEQ ID NO: 16039 - protein, 11 aa, Artificial Sequence
  Description of Artificial Sequence: Synthetic peptide
  XENP019668 vlCDR1
RASQSVGNDVA

SEQ ID NO: 16040 - protein, 7 aa, Artificial Sequence
  Description of Artificial Sequence: Synthetic peptide
  XENP019668 vlCDR2
YASHRYT

SEQ ID NO: 16041 - protein, 9 aa, Artificial Sequence
  Description of Artificial Sequence: Synthetic peptide
  XENP019668 vlCDR3
QQDFSSPRT

SEQ ID NO: 16042 - protein, 249 aa, Artificial Sequence
  Description of Artificial Sequence: Synthetic polypeptide
  XENP019669 1G6_L1.210_H1.288_scFv(GKPGS)4
EIVLTQSPATLSASPGERVTLTCRASQSVGNDVAWYQQKPGQAPRLLINYASHRYTGVPDRFTGSGYGTEFTLTISSVQSEDFGVYYCQQDFSSPRTFGCGTKVEIKGKPGSGKPGSGKPGSGKPGSEVQLVESGGGLVKPGGSLRLSCVASGFTFSNYWMNWVRQAPGKCLEWVAEIRLYSNNYATHYAESVKGRFTISRDDSKSTLYLQMNNLKTEDTGVYYCTRYYGNYGGYFDVWGRGTLVTVSS

SEQ ID NO: 16043 - protein, 107 aa, Artificial Sequence; identical to SEQ ID NO: 16035
  Description of Artificial Sequence: Synthetic polypeptide
  VH of XENP019669

SEQ ID NO: 16044 - protein, 122 aa, Artificial Sequence; identical to SEQ ID NO: 16034
  Description of Artificial Sequence: Synthetic polypeptide
  VL of XENP019669

SEQ ID NO: 16045 - protein, 11 aa, Artificial Sequence
  Description of Artificial Sequence: Synthetic peptide
  XENP019669 vhCDR1
RASQSVGNDVA

SEQ ID NO: 16046 - protein, 7 aa, Artificial Sequence
  Description of Artificial Sequence: Synthetic peptide
  XENP019669 vhCDR2
YASHRYT

SEQ ID NO: 16047 - protein, 9 aa, Artificial Sequence
  Description of Artificial Sequence: Synthetic peptide
  XENP019669 vhCDR3
QQDFSSPRT

SEQ ID NO: 16048 - protein, 5 aa, Artificial Sequence
  Description of Artificial Sequence: Synthetic peptide
  XENP019669 vlCDR1
NYWMN

SEQ ID NO: 16049 - protein, 19 aa, Artificial Sequence
  Description of Artificial Sequence: Synthetic peptide
  XENP019669 vlCDR2
EIRLYSNNYATHYAESVKG

SEQ ID NO: 16050 - protein, 11 aa, Artificial Sequence
  Description of Artificial Sequence: Synthetic peptide
  XENP019669 vlCDR3
YYGNYGGYFDV

SEQ ID NO: 16051 - protein, 249 aa, Artificial Sequence
  Description of Artificial Sequence: Synthetic polypeptide
  XENP019690 1G6_H1.279_L1.194_scFv(GKPGS)4
EVQLVESGGGLVKPGGSLRLSCVASGFTFSNYWMNWVRQAPGKGLEWVAEIRLYSNNYATHYAESVKGRFTISRDDSKSTLYLQMNNLKTEDTGVYYCTRYYGNYGGYFDVWGRGTLVTVSSGKPGSGKPGSGKPGSGKPGSEIVLTQSPATLSASPGERVTLTCRASQSVGNDVAWYQQKPGQAPRLLINYASHRYTGVPDRFTGSGYGTEFTLTISSVQSEDFGVYYCQQDFSSPRTFGGGTKVEIK

SEQ ID NO: 16052 - protein, 122 aa, Artificial Sequence; identical to SEQ ID NO: 2872
  Description of Artificial Sequence: Synthetic polypeptide
  VH of XENP019690

SEQ ID NO: 16053 - protein, 107 aa, Artificial Sequence; identical to SEQ ID NO: 2871
  Description of Artificial Sequence: Synthetic polypeptide
  VL of XENP019690

SEQ ID NO: 16054 - protein, 5 aa, Artificial Sequence
  Description of Artificial Sequence: Synthetic peptide
  XENP019690 vhCDR1
NYWMN

SEQ ID NO: 16055 - protein, 19 aa, Artificial Sequence
  Description of Artificial Sequence: Synthetic peptide
  XENP019690 vhCDR2
EIRLYSNNYATHYAESVKG

SEQ ID NO: 16056 - protein, 11 aa, Artificial Sequence
  Description of Artificial Sequence: Synthetic peptide
  XENP019690 vhCDR3
YYGNYGGYFDV

SEQ ID NO: 16057 - protein, 11 aa, Artificial Sequence
  Description of Artificial Sequence: Synthetic peptide
  XENP019690 vlCDR1
RASQSVGNDVA

SEQ ID NO: 16058 - protein, 7 aa, Artificial Sequence
  Description of Artificial Sequence: Synthetic peptide
  XENP019690 vlCDR2
YASHRYT

SEQ ID NO: 16059 - protein, 9 aa, Artificial Sequence
  Description of Artificial Sequence: Synthetic peptide
  XENP019690 vlCDR3
QQDFSSPRT

SEQ ID NO: 16060 - protein, 249 aa, Artificial Sequence
  Description of Artificial Sequence: Synthetic polypeptide
  XENP019691 1G6_H1.282_L1.194_scFv(GKPGS)4
EVQLVESGGGLVKPGGSLRLTCVASGFTFSNYWMNWVRQAPGKGLEWVAEIRLYSNNYATHYAESVKGRFTISRDDSKSMLYLQMNNLKTEDTGVYYCTRYYGNYGGYFDVWGRGTLVTVSSGKPGSGKPGSGKPGSGKPGSEIVLTQSPATLSASPGERVTLTCRASQSVGNDVAWYQQKPGQAPRLLINYASHRYTGVPDRFTGSGYGTEFTLTISSVQSEDFGVYYCQQDFSSPRTFGGGTKVEIK

SEQ ID NO: 16061 - protein, 122 aa, Artificial Sequence; identical to SEQ ID NO: 15611
  Description of Artificial Sequence: Synthetic polypeptide
  VH of XENP019691

SEQ ID NO: 16062 - protein, 107 aa, Artificial Sequence; identical to SEQ ID NO: 2871
  Description of Artificial Sequence: Synthetic polypeptide
  VL of XENP019691

SEQ ID NO: 16063 - protein, 5 aa, Artificial Sequence
  Description of Artificial Sequence: Synthetic peptide
  XENP019691 vhCDR1
NYWMN

SEQ ID NO: 16064 - protein, 19 aa, Artificial Sequence
  Description of Artificial Sequence: Synthetic peptide
  XENP019691 vhCDR2
EIRLYSNNYATHYAESVKG

SEQ ID NO: 16065 - protein, 11 aa, Artificial Sequence
  Description of Artificial Sequence: Synthetic peptide
  XENP019691 vhCDR3
YYGNYGGYFDV

SEQ ID NO: 16066 - protein, 11 aa, Artificial Sequence
  Description of Artificial Sequence: Synthetic peptide
  XENP019691 vlCDR1
RASQSVGNDVA

SEQ ID NO: 16067 - protein, 7 aa, Artificial Sequence
  Description of Artificial Sequence: Synthetic peptide
  XENP019691 vlCDR2
YASHRYT

SEQ ID NO: 16068 - protein, 9 aa, Artificial Sequence
  Description of Artificial Sequence: Synthetic peptide
  XENP019691 vlCDR3
QQDFSSPRT

SEQ ID NO: 16069 - protein, 249 aa, Artificial Sequence
  Description of Artificial Sequence: Synthetic polypeptide
  XENP019692 1G6_L1.194_H1.279_scFv(GKPGS)4
EIVLTQSPATLSASPGERVTLTCRASQSVGNDVAWYQQKPGQAPRLLINYASHRYTGVPDRFTGSGYGTEFTLTISSVQSEDFGVYYCQQDFSSPRTFGGGTKVEIKGKPGSGKPGSGKPGSGKPGSEVQLVESGGGLVKPGGSLRLSCVASGFTFSNYWMNWVRQAPGKGLEWVAEIRLYSNNYATHYAESVKGRFTISRDDSKSTLYLQMNNLKTEDTGVYYCTRYYGNYGGYFDVWGRGTLVTVSS

SEQ ID NO: 16070 - protein, 107 aa, Artificial Sequence; identical to SEQ ID NO: 2871
  Description of Artificial Sequence: Synthetic polypeptide
  VH of XENP019692

SEQ ID NO: 16071 - protein, 122 aa, Artificial Sequence; identical to SEQ ID NO: 2872
  Description of Artificial Sequence: Synthetic polypeptide
  VL of XENP019692

SEQ ID NO: 16072 - protein, 11 aa, Artificial Sequence
  Description of Artificial Sequence: Synthetic peptide
  XENP019692 vhCDR1
RASQSVGNDVA

SEQ ID NO: 16073 - protein, 7 aa, Artificial Sequence
  Description of Artificial Sequence: Synthetic peptide
  XENP019692 vhCDR2
YASHRYT

SEQ ID NO: 16074 - protein, 9 aa, Artificial Sequence
  Description of Artificial Sequence: Synthetic peptide
  XENP019692 vhCDR3
QQDFSSPRT

SEQ ID NO: 16075 - protein, 5 aa, Artificial Sequence
  Description of Artificial Sequence: Synthetic peptide
  XENP019692 vlCDR1
NYWMN

SEQ ID NO: 16076 - protein, 19 aa, Artificial Sequence
  Description of Artificial Sequence: Synthetic peptide
  XENP019692 vlCDR2
EIRLYSNNYATHYAESVKG

SEQ ID NO: 16077 - protein, 11 aa, Artificial Sequence
  Description of Artificial Sequence: Synthetic peptide
  XENP019692 vlCDR3
YYGNYGGYFDV

SEQ ID NO: 16078 - protein, 249 aa, Artificial Sequence
  Description of Artificial Sequence: Synthetic polypeptide
  XENP019693 1G6_L1.194_H1.282_scFv(GKPGS)4
EIVLTQSPATLSASPGERVTLTCRASQSVGNDVAWYQQKPGQAPRLLINYASHRYTGVPDRFTGSGYGTEFTLTISSVQSEDFGVYYCQQDFSSPRTFGGGTKVEIKGKPGSGKPGSGKPGSGKPGSEVQLVESGGGLVKPGGSLRLTCVASGFTFSNYWMNWVRQAPGKGLEWVAEIRLYSNNYATHYAESVKGRFTISRDDSKSMLYLQMNNLKTEDTGVYYCTRYYGNYGGYFDVWGRGTLVTVSS

SEQ ID NO: 16079 - protein, 107 aa, Artificial Sequence; identical to SEQ ID NO: 2871
  Description of Artificial Sequence: Synthetic polypeptide
  VH of XENP019693

SEQ ID NO: 16080 - protein, 122 aa, Artificial Sequence; identical to SEQ ID NO: 15611
  Description of Artificial Sequence: Synthetic polypeptide
  VL of XENP019693

SEQ ID NO: 16081 - protein, 11 aa, Artificial Sequence
  Description of Artificial Sequence: Synthetic peptide
  XENP019693 vhCDR1
RASQSVGNDVA

SEQ ID NO: 16082 - protein, 7 aa, Artificial Sequence
  Description of Artificial Sequence: Synthetic peptide
  XENP019693 vhCDR2
YASHRYT

SEQ ID NO: 16083 - protein, 9 aa, Artificial Sequence
  Description of Artificial Sequence: Synthetic peptide
  XENP019693 vhCDR3
QQDFSSPRT

SEQ ID NO: 16084 - protein, 5 aa, Artificial Sequence
  Description of Artificial Sequence: Synthetic peptide
  XENP019693 vlCDR1
NYWMN

SEQ ID NO: 16085 - protein, 19 aa, Artificial Sequence
  Description of Artificial Sequence: Synthetic peptide
  XENP019693 vlCDR2
EIRLYSNNYATHYAESVKG

SEQ ID NO: 16086 - protein, 11 aa, Artificial Sequence
  Description of Artificial Sequence: Synthetic peptide
  XENP019693 vlCDR3
YYGNYGGYFDV

SEQ ID NO: 16087 - protein, 247 aa, Artificial Sequence
  Description of Artificial Sequence: Synthetic polypeptide
  XENP020162 2E9_H1L1_scFv(GKPGS)4
QVQLVQSGAEVKKPGASVKVSCKASGYAFTNYWLGWVRQAPGQGLEWMGNFYPGSSNTYYNEKFQGRVTMTADKSISTAYMELSRLRSDDTAVYFCARHYGTNYRYFDVWGAGTLVTVSSGKPGSGKPGSGKPGSGKPGSDIVLTQSPGTLSLSPGERATLSCRASQSVSNDVAWYQQKPGQSPRLLIYYASNRYTGVPDRFTGSGYGTDFTLTISRLEPEDFAVYFCQQDYSSPYTFGGGTKVEIK

SEQ ID NO: 16088 - protein, 120 aa, Artificial Sequence; identical to SEQ ID NO: 3091
  Description of Artificial Sequence: Synthetic polypeptide
  VH of XENP020162

SEQ ID NO: 16089 - protein, 107 aa, Artificial Sequence; identical to SEQ ID NO: 3092
  Description of Artificial Sequence: Synthetic polypeptide
  VL of XENP020162

SEQ ID NO: 16090 - protein, 5 aa, Artificial Sequence
  Description of Artificial Sequence: Synthetic peptide
  XENP020162 vhCDR1
NYWLG

SEQ ID NO: 16091 - protein, 17 aa, Artificial Sequence
  Description of Artificial Sequence: Synthetic peptide
  XENP020162 vhCDR2
NFYPGSSNTYYNEKFQG

SEQ ID NO: 16092 - protein, 11 aa, Artificial Sequence
  Description of Artificial Sequence: Synthetic peptide
  XENP020162 vhCDR3
HYGTNYRYFDV

SEQ ID NO: 16093 - protein, 11 aa, Artificial Sequence
  Description of Artificial Sequence: Synthetic peptide
  XENP020162 vlCDR1
RASQSVSNDVA

SEQ ID NO: 16094 - protein, 7 aa, Artificial Sequence
  Description of Artificial Sequence: Synthetic peptide
  XENP020162 vlCDR2
YASNRYT

SEQ ID NO: 16095 - protein, 9 aa, Artificial Sequence
  Description of Artificial Sequence: Synthetic peptide
  XENP020162 vlCDR3
QQDYSSPYT

SEQ ID NO: 16096 - protein, 247 aa, Artificial Sequence
  Description of Artificial Sequence: Synthetic polypeptide
  XENP020163 2E9_H2L1_scFv(GKPGS)4
EVQLVQSGAEVKKPGESLKISCKASGYAFTNYWLGWVRQMPGKGLEWMGNFYPGSSNTYYNPSFQGQVTISADKSISTAYLQWSSLKASDTAMYFCARHYGTNYRYFDVWGAGTLVTVSSGKPGSGKPGSGKPGSGKPGSDIVLTQSPGTLSLSPGERATLSCRASQSVSNDVAWYQQKPGQSPRLLIYYASNRYTGVPDRFTGSGYGTDFTLTISRLEPEDFAVYFCQQDYSSPYTFGGGTKVEIK

SEQ ID NO: 16097 - protein, 120 aa, Artificial Sequence
  Description of Artificial Sequence: Synthetic polypeptide
  VH of XENP020163
EVQLVQSGAEVKKPGESLKISCKASGYAFTNYWLGWVRQMPGKGLEWMGNFYPGSSNTYYNPSFQGQVTISADKSISTAYLQWSSLKASDTAMYFCARHYGTNYRYFDVWGAGTLVTVSS

SEQ ID NO: 16098 - protein, 107 aa, Artificial Sequence; identical to SEQ ID NO: 3092
  Description of Artificial Sequence: Synthetic polypeptide
  VL of XENP020163

SEQ ID NO: 16099 - protein, 5 aa, Artificial Sequence
  Description of Artificial Sequence: Synthetic peptide
  XENP020163 vhCDR1
NYWLG

SEQ ID NO: 16100 - protein, 17 aa, Artificial Sequence
  Description of Artificial Sequence: Synthetic peptide
  XENP020163 vhCDR2
NFYPGSSNTYYNPSFQG

SEQ ID NO: 16101 - protein, 11 aa, Artificial Sequence
  Description of Artificial Sequence: Synthetic peptide
  XENP020163 vhCDR3
HYGTNYRYFDV

SEQ ID NO: 16102 - protein, 11 aa, Artificial Sequence
  Description of Artificial Sequence: Synthetic peptide
  XENP020163 vlCDR1
RASQSVSNDVA

SEQ ID NO: 16103 - protein, 7 aa, Artificial Sequence
  Description of Artificial Sequence: Synthetic peptide
  XENP020163 vlCDR2
YASNRYT

SEQ ID NO: 16104 - protein, 9 aa, Artificial Sequence
  Description of Artificial Sequence: Synthetic peptide
  XENP020163 vlCDR3
QQDYSSPYT

SEQ ID NO: 16105 - protein, 242 aa, Artificial Sequence
  Description of Artificial Sequence: Synthetic polypeptide
  XENP020164 3C11(PD-1)_H1L1_scFv(GKPGS)4
QVQLVQSGAEVKKPGASVKVSCKASGYTFTSYWMHWVRQAPGQGLEWMGAIYPGNIATSYNQKFQGRVTMTADTSTSTAYMELSSLRSEDTAVYYCTTSYVMDYWGQGTLVTVSSGKPGSGKPGSGKPGSGKPGSDIVMTQSPSSLSASVGDRVTITCQASQDINSYLSWFQQKPGKSPKTLIYRANRLVDGVPSRFSGSGSGQDYTFTISSLQPEDIATYYCLQYDEFPYTFGGGTKVEIK

SEQ ID NO: 16106 - protein, 115 aa, Artificial Sequence
  Description of Artificial Sequence: Synthetic polypeptide
  VH of XENP020164
QVQLVQSGAEVKKPGASVKVSCKASGYTFTSYWMHWVRQAPGQGLEWMGAIYPGNIATSYNQKFQGRVTMTADTSTSTAYMELSSLRSEDTAVYYCTTSYVMDYWGQGTLVTVSS

SEQ ID NO: 16107 - protein, 107 aa, Artificial Sequence
  Description of Artificial Sequence: Synthetic polypeptide
  VL of XENP020164
DIVMTQSPSSLSASVGDRVTITCQASQDINSYLSWFQQKPGKSPKTLIYRANRLVDGVPSRFSGSGSGQDYTFTISSLQPEDIATYYCLQYDEFPYTFGGGTKVEIK

SEQ ID NO: 16108 - protein, 5 aa, Artificial Sequence
  Description of Artificial Sequence: Synthetic peptide
  XENP020164 vhCDR1
SYWMH

SEQ ID NO: 16109 - protein, 17 aa, Artificial Sequence
  Description of Artificial Sequence: Synthetic peptide
  XENP020164 vhCDR2
AIYPGNIATSYNQKFQG

SEQ ID NO: 16110 - protein, 6 aa, Artificial Sequence
  Description of Artificial Sequence: Synthetic peptide
  XENP020164 vhCDR3
SYVMDY

SEQ ID NO: 16111 - protein, 11 aa, Artificial Sequence
  Description of Artificial Sequence: Synthetic peptide
  XENP020164 vlCDR1
QASQDINSYLS

SEQ ID NO: 16112 - protein, 7 aa, Artificial Sequence
  Description of Artificial Sequence: Synthetic peptide
  XENP020164 vlCDR2
RANRLVD

SEQ ID NO: 16113 - protein, 9 aa, Artificial Sequence
  Description of Artificial Sequence: Synthetic peptide
  XENP020164 vlCDR3
LQYDEFPYT

SEQ ID NO: 16114 - protein, 239 aa, Artificial Sequence
  Description of Artificial Sequence: Synthetic polypeptide
  XENP020165 3G12_H1L1_scFv(GKPGS)4
QVQLVQSGAEVKKPGASVKVSCKASGYTFTSYWMHWVRQAPGQGLEWMGVIDPSDSYTSYNQKFQGRVTMTVDTSTSTAYMELSSLRSEDTAVYYCTGAYYWGQGTLVTVSSGKPGSGKPGSGKPGSGKPGSDIVLTQSPSSLSASVGDRVTITCRASQGISSNIGWLQQKPGKSFKGLIYHGTNLEDGVPSRFTGSGSGADYTLTISSLQPEDFATYYCVQYAQSPWTFGGGTKVEIK

SEQ ID NO: 16115 - protein, 112 aa, Artificial Sequence
  Description of Artificial Sequence: Synthetic polypeptide
  VH of XENP020165
QVQLVQSGAEVKKPGASVKVSCKASGYTFTSYWMHWVRQAPGQGLEWMGVIDPSDSYTSYNQKFQGRVTMTVDTSTSTAYMELSSLRSEDTAVYYCTGAYYWGQGTLVTVSS

SEQ ID NO: 16116 - protein, 107 aa, Artificial Sequence
  Description of Artificial Sequence: Synthetic polypeptide
  VL of XENP020165
DIVLTQSPSSLSASVGDRVTITCRASQGISSNIGWLQQKPGKSFKGLIYHGTNLEDGVPSRFTGSGSGADYTLTISSLQPEDFATYYCVQYAQSPWTFGGGTKVEIK

SEQ ID NO: 16117 - protein, 5 aa, Artificial Sequence
  Description of Artificial Sequence: Synthetic peptide
  XENP020165 vhCDR1
SYWMH

SEQ ID NO: 16118 - protein, 17 aa, Artificial Sequence
  Description of Artificial Sequence: Synthetic peptide
  XENP020165 vhCDR2
VIDPSDSYTSYNQKFQG

SEQ ID NO: 16119 - protein, 3 aa, Artificial Sequence
  Description of Artificial Sequence: Synthetic peptide
  XENP020165 vhCDR3
AYY

SEQ ID NO: 16120 - protein, 11 aa, Artificial Sequence
  Description of Artificial Sequence: Synthetic peptide
  XENP020165 vlCDR1
RASQGISSNIG

SEQ ID NO: 16121 - protein, 7 aa, Artificial Sequence
  Description of Artificial Sequence: Synthetic peptide
  XENP020165 vlCDR2
HGTNLED

SEQ ID NO: 16122 - protein, 9 aa, Artificial Sequence
  Description of Artificial Sequence: Synthetic peptide
  XENP020165 vlCDR3
VQYAQSPWT

SEQ ID NO: 16123 - protein, 239 aa, Artificial Sequence
  Description of Artificial Sequence: Synthetic polypeptide
  XENP020166 5C4_H1L1_scFv(GKPGS)4
QVQLVQSGAEVKKPGASVKVSCKASGYTFTDYWMHWLRQAPGQGLEWMGAIDTSDSYPTYNQKFQGRVTMTVDDSTSTAYMELSSLRSEDTAVYYCTRFDYWGQGTLVTVSSGKPGSGKPGSGKPGSGKPGSDIVMTQSPDSLAVSLGERATINCKASQSVSNDVAWYQQKPGQSPKLLIYYASNRYTGVPDRFTGSGYGTDFTLTISSLQAEDVAVYFCQQDYSSPYTFGGGTKVEIK

SEQ ID NO: 16124 - protein, 112 aa, Artificial Sequence
  Description of Artificial Sequence: Synthetic polypeptide
  VH of XENP020166
QVQLVQSGAEVKKPGASVKVSCKASGYTFTDYWMHWLRQAPGQGLEWMGAIDTSDSYPTYNQKFQGRVTMTVDDSTSTAYMELSSLRSEDTAVYYCTRFDYWGQGTLVTVSS

SEQ ID NO: 16125 - protein, 107 aa, Artificial Sequence
  Description of Artificial Sequence: Synthetic polypeptide
  VL of XENP020166
DIVMTQSPDSLAVSLGERATINCKASQSVSNDVAWYQQKPGQSPKLLIYYASNRYTGVPDRFTGSGYGTDFTLTISSLQAEDVAVYFCQQDYSSPYTFGGGTKVEIK

SEQ ID NO: 16126 - protein, 5 aa, Artificial Sequence
  Description of Artificial Sequence: Synthetic peptide
  XENP020166 vhCDR1
DYWMH

SEQ ID NO: 16127 - protein, 17 aa, Artificial Sequence
  Description of Artificial Sequence: Synthetic peptide
  XENP020166 vhCDR2
AIDTSDSYPTYNQKFQG

SEQ ID NO: 16128 - protein, 3 aa, Artificial Sequence
  Description of Artificial Sequence: Synthetic peptide
  XENP020166 vhCDR3
FDY

SEQ ID NO: 16129 - protein, 11 aa, Artificial Sequence
  Description of Artificial Sequence: Synthetic peptide
  XENP020166 vlCDR1
KASQSVSNDVA

SEQ ID NO: 16130 - protein, 7 aa, Artificial Sequence
  Description of Artificial Sequence: Synthetic peptide
  XENP020166 vlCDR2
YASNRYT

SEQ ID NO: 16131 - protein, 9 aa, Artificial Sequence
  Description of Artificial Sequence: Synthetic peptide
  XENP020166 vlCDR3
QQDYSSPYT

SEQ ID NO: 16132 - protein, 239 aa, Artificial Sequence
  Description of Artificial Sequence: Synthetic polypeptide
  XENP020167 5C4_H2L1_scFv(GKPGS)4
QVQLVQSGSELKKPGASVKVSCKASGYTFTDYWMHWLRQAPGQGLEWMGAIDTSDSYPTYNQGFTGRFVFSVDDSVSTAYLQISSLKAEDTAVYYCTRFDYWGQGTLVTVSSGKPGSGKPGSGKPGSGKPGSDIVMTQSPDSLAVSLGERATINCKASQSVSNDVAWYQQKPGQSPKLLIYYASNRYTGVPDRFTGSGYGTDFTLTISSLQAEDVAVYFCQQDYSSPYTFGGGTKVEIK

SEQ ID NO: 16133 - protein, 112 aa, Artificial Sequence
  Description of Artificial Sequence: Synthetic polypeptide
  VH of XENP020167
QVQLVQSGSELKKPGASVKVSCKASGYTFTDYWMHWLRQAPGQGLEWMGAIDTSDSYPTYNQGFTGRFVFSVDDSVSTAYLQISSLKAEDTAVYYCTRFDYWGQGTLVTVSS

SEQ ID NO: 16134 - protein, 107 aa, Artificial Sequence; identical to SEQ ID NO: 16125
  Description of Artificial Sequence: Synthetic polypeptide
  VL of XENP020167

SEQ ID NO: 16135 - protein, 5 aa, Artificial Sequence
  Description of Artificial Sequence: Synthetic peptide
  XENP020167 vhCDR1
DYWMH

SEQ ID NO: 16136 - protein, 17 aa, Artificial Sequence
  Description of Artificial Sequence: Synthetic peptide
  XENP020167 vhCDR2
AIDTSDSYPTYNQGFTG

SEQ ID NO: 16137 - protein, 3 aa, Artificial Sequence
  Description of Artificial Sequence: Synthetic peptide
  XENP020167 vhCDR3
FDY

SEQ ID NO: 16138 - protein, 11 aa, Artificial Sequence
  Description of Artificial Sequence: Synthetic peptide
  XENP020167 vlCDR1
KASQSVSNDVA

SEQ ID NO: 16139 - protein, 7 aa, Artificial Sequence
  Description of Artificial Sequence: Synthetic peptide
  XENP020167 vlCDR2
YASNRYT

SEQ ID NO: 16140 - protein, 9 aa, Artificial Sequence
  Description of Artificial Sequence: Synthetic peptide
  XENP020167 vlCDR3
QQDYSSPYT

SEQ ID NO: 16141 - protein, 443 aa, Artificial Sequence
  Description of Artificial Sequence: Synthetic polypeptide
  XENP013810 Nivolumab_H0L0_IgG1 Heavy Chain
QVQLVESGGGVVQPGRSLRLDCKASGITFSNSGMHWVRQAPGKGLEWVAVIWYDGSKRYYADSVKGRFTISRDNSKNTLFLQMNSLRAEDTAVYYCATNDDYWGQGTLVTVSSASTKGPSVFPLAPSSKSTSGGTAALGCLVKDYFPEPVTVSWNSGALTSGVHTFPAVLQSSGLYSLSSVVTVPSSSLGTQTYICNVNHKPSNTKVDKKVEPKSCDKTHTCPPCPAPELLGGPSVFLFPPKPKDTLMISRTPEVTCVVVDVSHEDPEVKFNWYVDGVEVHNAKTKPREEQYNSTYRVVSVLTVLHQDWLNGKEYKCKVSNKALPAPIEKTISKAKGQPREPQVYTLPPSREEMTKNQVSLTCLVKGFYPSDIAVEWESNGQPENNYKTTPPVLDSDGSFFLYSKLTVDKSRWQQGNVFSCSVMHEALHNHYTQKSLSLSPGK

SEQ ID NO: 16142 - protein, 113 aa, Artificial Sequence [sequence omitted]

SEQ ID NO: 16143 - protein, 5 aa, Artificial Sequence
  Description of Artificial Sequence: Synthetic peptide
  XENP013810 vhCDR1
NSGMH

SEQ ID NO: 16144 - protein, 17 aa, Artificial Sequence
  Description of Artificial Sequence: Synthetic peptide
  XENP013810 vhCDR2
VIWYDGSKRYYADSVKG

SEQ ID NO: 16145 - protein, 4 aa, Artificial Sequence
  Description of Artificial Sequence: Synthetic peptide
  XENP013810 vhCDR3
NDDY

SEQ ID NO: 16146 - protein, 214 aa, Artificial Sequence
  Description of Artificial Sequence: Synthetic polypeptide
  XENP013810 Nivolumab_H0L0_IgG1 Light Chain
EIVLTQSPATLSLSPGERATLSCRASQSVSSYLAWYQQKPGQAPRLLIYDASNRATGIPARFSGSGSGTDFTLTISSLEPEDFAVYYCQQSSNWPRTFGQGTKVEIKRTVAAPSVFIFPPSDEQLKSGTASVVCLLNNFYPREAKVQWKVDNALQSGNSQESVTEQDSKDSTYSLSSTLTLSKADYEKHKVYACEVTHQGLSSPVTKSFNRGEC

SEQ ID NO: 16147 - protein, 107 aa, Artificial Sequence [sequence omitted]

SEQ ID NO: 16148 - protein, 11 aa, Artificial Sequence
  Description of Artificial Sequence: Synthetic peptide
  XENP013810 vlCDR1
RASQSVSSYLA

SEQ ID NO: 16149 - protein, 7 aa, Artificial Sequence
  Description of Artificial Sequence: Synthetic peptide
  XENP013810 vlCDR2
DASNRAT

SEQ ID NO: 16150 - protein, 9 aa, Artificial Sequence
  Description of Artificial Sequence: Synthetic peptide
  XENP013810 vlCDR3
QQSSNWPRT

SEQ ID NO: 16151 - protein, 443 aa, Artificial Sequence
  Description of Artificial Sequence: Synthetic polypeptide
  XENP013960 Nivolumab_H0L0_IgG1_G236R/L328R Heavy Chain
QVQLVESGGGVVQPGRSLRLDCKASGITFSNSGMHWVRQAPGKGLEWVAVIWYDGSKRYYADSVKGRFTISRDNSKNTLFLQMNSLRAEDTAVYYCATNDDYWGQGTLVTVSSASTKGPSVFPLAPSSKSTSGGTAALGCLVKDYFPEPVTVSWNSGALTSGVHTFPAVLQSSGLYSLSSVVTVPSSSLGTQTYICNVNHKPSNTKVDKKVEPKSCDKTHTCPPCPAPELLRGPSVFLFPPKPKDTLMISRTPEVTCVVVDVSHEDPEVKFNWYVDGVEVHNAKTKPREEQYNSTYRVVSVLTVLHQDWLNGKEYKCKVSNKARPAPIEKTISKAKGQPREPQVYTLPPSREEMTKNQVSLTCLVKGFYPSDIAVEWESNGQPENNYKTTPPVLDSDGSFFLYSKLTVDKSRWQQGNVFSCSVMHEALHNHYTQKSLSLSPGK

SEQ ID NO: 16152 - protein, 113 aa, Artificial Sequence [sequence omitted]

SEQ ID NO: 16153 - protein, 5 aa, Artificial Sequence
  Description of Artificial Sequence: Synthetic peptide
  XENP013960 vhCDR1
NSGMH

SEQ ID NO: 16154 - protein, 17 aa, Artificial Sequence
  Description of Artificial Sequence: Synthetic peptide
  XENP013960 vhCDR2
VIWYDGSKRYYADSVKG

SEQ ID NO: 16155 - protein, 4 aa, Artificial Sequence
  Description of Artificial Sequence: Synthetic peptide
  XENP013960 vhCDR3
NDDY

SEQ ID NO: 16156 - protein, 214 aa, Artificial Sequence; identical to SEQ ID NO: 16146
  Description of Artificial Sequence: Synthetic polypeptide
  XENP013960 Nivolumab_H0L0_IgG1_G236R/L328R Light Chain

SEQ ID NO: 16157 - protein, 107 aa, Artificial Sequence [sequence omitted]

SEQ ID NO: 16158 - protein, 11 aa, Artificial Sequence
  Description of Artificial Sequence: Synthetic peptide
  XENP013960 vlCDR1
RASQSVSSYLA

SEQ ID NO: 16159 - protein, 7 aa, Artificial Sequence
  Description of Artificial Sequence: Synthetic peptide
  XENP013960 vlCDR2
DASNRAT

SEQ ID NO: 16160 - protein, 9 aa, Artificial Sequence
  Description of Artificial Sequence: Synthetic peptide
  XENP013960 vlCDR3
QQSSNWPRT

SEQ ID NO: 16161 - protein, 442 aa, Artificial Sequence
  Description of Artificial Sequence: Synthetic polypeptide
  XENP016432 Nivolumab_H0L0_IgG1_PVA_/S267K Heavy Chain
QVQLVESGGGVVQPGRSLRLDCKASGITFSNSGMHWVRQAPGKGLEWVAVIWYDGSKRYYADSVKGRFTISRDNSKNTLFLQMNSLRAEDTAVYYCATNDDYWGQGTLVTVSSASTKGPSVFPLAPSSKSTSGGTAALGCLVKDYFPEPVTVSWNSGALTSGVHTFPAVLQSSGLYSLSSVVTVPSSSLGTQTYICNVNHKPSNTKVDKKVEPKSCDKTHTCPPCPAPPVAGPSVFLFPPKPKDTLMISRTPEVTCVVVDVKHEDPEVKFNWYVDGVEVHNAKTKPREEQYNSTYRVVSVLTVLHQDWLNGKEYKCKVSNKALPAPIEKTISKAKGQPREPQVYTLPPSREEMTKNQVSLTCLVKGFYPSDIAVEWESNGQPENNYKTTPPVLDSDGSFFLYSKLTVDKSRWQQGNVFSCSVMHEALHNHYTQKSLSLSPGK

SEQ ID NO: 16162 - protein, 113 aa, Artificial Sequence [sequence omitted]

SEQ ID NO: 16163 - protein, 5 aa, Artificial Sequence
  Description of Artificial Sequence: Synthetic peptide
  XENP016432 vhCDR1
NSGMH

SEQ ID NO: 16164 - protein, 17 aa, Artificial Sequence
  Description of Artificial Sequence: Synthetic peptide
  XENP016432 vhCDR2
VIWYDGSKRYYADSVKG

SEQ ID NO: 16165 - protein, 4 aa, Artificial Sequence
  Description of Artificial Sequence: Synthetic peptide
  XENP016432 vhCDR3
NDDY

SEQ ID NO: 16166 - protein, 214 aa, Artificial Sequence; identical to SEQ ID NO: 16146
  Description of Artificial Sequence: Synthetic polypeptide
  XENP016432 Nivolumab_H0L0_IgG1_PVA_/S267K Light Chain

SEQ ID NO: 16167 - protein, 107 aa, Artificial Sequence [sequence omitted]

SEQ ID NO: 16168 - protein, 11 aa, Artificial Sequence
  Description of Artificial Sequence: Synthetic peptide
  XENP016432 vlCDR1
RASQSVSSYLA

SEQ ID NO: 16169 - protein, 7 aa, Artificial Sequence
  Description of Artificial Sequence: Synthetic peptide
  XENP016432 vlCDR2
DASNRAT

SEQ ID NO: 16170 - protein, 9 aa, Artificial Sequence
  Description of Artificial Sequence: Synthetic peptide
  XENP016432 vlCDR3
QQSSNWPRT

SEQ ID NO: 16171 - protein, 440 aa, Artificial Sequence
  Description of Artificial Sequence: Synthetic polypeptide
  XENP016602 Nivolumab_H0_IgG4_S228P Heavy Chain
QVQLVESGGGVVQPGRSLRLDCKASGITFSNSGMHWVRQAPGKGLEWVAVIWYDGSKRYYADSVKGRFTISRDNSKNTLFLQMNSLRAEDTAVYYCATNDDYWGQGTLVTVSSASTKGPSVFPLAPSSKSTSGGTAALGCLVKDYFPEPVTVSWNSGALTSGVHTFPAVLQSSGLYSLSSVVTVPSSSLGTKTYTCNVDHKPSNTKVDKRVESKYGPPCPPCPAPEFLGGPSVFLFPPKPKDTLMISRTPEVTCVVVDVSQEDPEVQFNWYVDGVEVHNAKTKPREEQFNSTYRVVSVLTVLHQDWLNGKEYKCKVSNKGLPSSIEKTISKAKGQPREPQVYTLPPSQEEMTKNQVSLTCLVKGFYPSDIAVEWESNGQPENNYKTTPPVLDSDGSFFLYSRLTVDKSRWQEGNVFSCSVMHEALHNHYTQKSLSLSLGK

SEQ ID NO: 16172 - protein, 113 aa, Artificial Sequence [sequence omitted]

SEQ ID NO: 16173 - protein, 5 aa, Artificial Sequence
  Description of Artificial Sequence: Synthetic peptide
  XENP016602 vhCDR1
NSGMH

SEQ ID NO: 16174 - protein, 17 aa, Artificial Sequence
  Description of Artificial Sequence: Synthetic peptide
  XENP016602 vhCDR2
VIWYDGSKRYYADSVKG

SEQ ID NO: 16175 - protein, 4 aa, Artificial Sequence
  Description of Artificial Sequence: Synthetic peptide
  XENP016602 vhCDR3
NDDY

SEQ ID NO: 16176 - protein, 214 aa, Artificial Sequence; identical to SEQ ID NO: 16146
  Description of Artificial Sequence: Synthetic polypeptide
  XENP016602 Nivolumab_H0_IgG4_S228P Light Chain

SEQ ID NO: 16177 - protein, 107 aa, Artificial Sequence [sequence omitted]

SEQ ID NO: 16178 - protein, 11 aa, Artificial Sequence
  Description of Artificial Sequence: Synthetic peptide
  XENP016602 vlCDR1
RASQSVSSYLA

SEQ ID NO: 16179 - protein, 7 aa, Artificial Sequence
  Description of Artificial Sequence: Synthetic peptide
  XENP016602 vlCDR2
DASNRAT

SEQ ID NO: 16180 - protein, 9 aa, Artificial Sequence
  Description of Artificial Sequence: Synthetic peptide
  XENP016602 vlCDR3
QQSSNWPRT

SEQ ID NO: 16181 - protein, 447 aa, Artificial Sequence
  Description of Artificial Sequence: Synthetic polypeptide
  XENP016603 Pembrolizumab_H0_IgG4_S228P Heavy Chain
QVQLVQSGVEVKKPGASVKVSCKASGYTFTNYYMYWVRQAPGQGLEWMGGINPSNGGTNFNEKFKNRVTLTTDSSTTTAYMELKSLQFDDTAVYYCARRDYRFDMGFDYWGQGTTVTVSSASTKGPSVFPLAPSSKSTSGGTAALGCLVKDYFPEPVTVSWNSGALTSGVHTFPAVLQSSGLYSLSSVVTVPSSSLGTKTYTCNVDHKPSNTKVDKRVESKYGPPCPPCPAPEFLGGPSVFLFPPKPKDTLMISRTPEVTCVVVDVSQEDPEVQFNWYVDGVEVHNAKTKPREEQFNSTYRVVSVLTVLHQDWLNGKEYKCKVSNKGLPSSIEKTISKAKGQPREPQVYTLPPSQEEMTKNQVSLTCLVKGFYPSDIAVEWESNGQPENNYKTTPPVLDSDGSFFLYSRLTVDKSRWQEGNVFSCSVMHEALHNHYTQKSLSLSLGK

SEQ ID NO: 16182 - protein, 120 aa, Artificial Sequence [sequence omitted]

SEQ ID NO: 16183 - protein, 5 aa, Artificial Sequence
  Description of Artificial Sequence: Synthetic peptide
  XENP016603 vhCDR1
NYYMY

SEQ ID NO: 16184 - protein, 17 aa, Artificial Sequence
  Description of Artificial Sequence: Synthetic peptide
  XENP016603 vhCDR2
GINPSNGGTNFNEKFKN

SEQ ID NO: 16185 - protein, 11 aa, Artificial Sequence
  Description of Artificial Sequence: Synthetic peptide
  XENP016603 vhCDR3
RDYRFDMGFDY

SEQ ID NO: 16186 - protein, 218 aa, Artificial Sequence
  Description of Artificial Sequence: Synthetic polypeptide
  XENP016603 Pembrolizumab_H0_IgG4_S228P Light Chain
EIVLTQSPATLSLSPGERATLSCRASKGVSTSGYSYLHWYQQKPGQAPRLLIYLASYLESGVPARFSGSGSGTDFTLTISSLEPEDFAVYYCQHSRDLPLTFGGGTKVEIKRTVAAPSVFIFPPSDEQLKSGTASVVCLLNNFYPREAKVQWKVDNALQSGNSQESVTEQDSKDSTYSLSSTLTLSKADYEKHKVYACEVTHQGLSSPVTKSFNRGEC

SEQ ID NO: 16187 - protein, 111 aa, Artificial Sequence [sequence omitted]

SEQ ID NO: 16188 - protein, 15 aa, Artificial Sequence
  Description of Artificial Sequence: Synthetic peptide
  XENP016603 vlCDR1
RASKGVSTSGYSYLH

SEQ ID NO: 16189 - protein, 7 aa, Artificial Sequence
  Description of Artificial Sequence: Synthetic peptide
  XENP016603 vlCDR2
LASYLES

SEQ ID NO: 16190 - protein, 9 aa, Artificial Sequence
  Description of Artificial Sequence: Synthetic peptide
  XENP016603 vlCDR3
QHSRDLPLT

SEQ ID NO: 16191 - protein, 443 aa, Artificial Sequence
  Description of Artificial Sequence: Synthetic polypeptide
  XENP017903 1A2_H1L1_IgG1_PVA_/S267K Heavy Chain
QIQLVQSGAEVKKPGASVKVSCKASGYTFTDYSMHWVRQAPGQGLEWMGWINTETGEPTYADKFQGRVTMTLDTSTSTAYMELSSLRSEDTAVYFCASSPLDYWGQGTLVTVSSASTKGPSVFPLAPSSKSTSGGTAALGCLVKDYFPEPVTVSWNSGALTSGVHTFPAVLQSSGLYSLSSVVTVPSSSLGTQTYICNVNHKPSNTKVDKKVEPKSCDKTHTCPPCPAPPVAGPSVFLFPPKPKDTLMISRTPEVTCVVVDVKHEDPEVKFNWYVDGVEVHNAKTKPREEQYNSTYRVVSVLTVLHQDWLNGKEYKCKVSNKALPAPIEKTISKAKGQPREPQVYTLPPSREEMTKNQVSLTCLVKGFYPSDIAVEWESNGQPENNYKTTPPVLDSDGSFFLYSKLTVDKSRWQQGNVFSCSVMHEALHNHYTQKSLSLSPGK

SEQ ID NO: 16192 - protein, 114 aa, Artificial Sequence; identical to SEQ ID NO: 10895
  Description of Artificial Sequence: Synthetic polypeptide
  VH of XENP017903

SEQ ID NO: 16193 - protein, 5 aa, Artificial Sequence
  Description of Artificial Sequence: Synthetic peptide
  XENP017903 vhCDR1
DYSMH

SEQ ID NO: 16194 - protein, 17 aa, Artificial Sequence
  Description of Artificial Sequence: Synthetic peptide
  XENP017903 vhCDR2
WINTETGEPTYADKFQG

SEQ ID NO: 16195 - protein, 5 aa, Artificial Sequence
  Description of Artificial Sequence: Synthetic peptide
  XENP017903 vhCDR3
SPLDY

SEQ ID NO: 16196 - protein, 219 aa, Artificial Sequence
  Description of Artificial Sequence: Synthetic polypeptide
  XENP017903 1A2_H1L1_IgG1_PVA_/S267K Light Chain
DLLLTQSPLSLPVTPGEPASISCRSSQSIVHSNGNTYLEWFLQKPGQSPQLLIYKVFNRFSGVPDRFSGSGSGTDFTLKISRVEAEDVGVYYCFQGSHVPFTFGSGTKLEIKRTVAAPSVFIFPPSDEQLKSGTASVVCLLNNFYPREAKVQWKVDNALQSGNSQESVTEQDSKDSTYSLSSTLTLSKADYEKHKVYACEVTHQGLSSPVTKSFNRGEC

SEQ ID NO: 16197 - protein, 112 aa, Artificial Sequence; identical to SEQ ID NO: 10896
  Description of Artificial Sequence: Synthetic polypeptide
  VL of XENP017903

SEQ ID NO: 16198 - protein, 16 aa, Artificial Sequence
  Description of Artificial Sequence: Synthetic peptide
  XENP017903 vlCDR1
RSSQSIVHSNGNTYLE

SEQ ID NO: 16199 - protein, 7 aa, Artificial Sequence
  Description of Artificial Sequence: Synthetic peptide
  XENP017903 vlCDR2
KVFNRFS

SEQ ID NO: 16200 - protein, 9 aa, Artificial Sequence
  Description of Artificial Sequence: Synthetic peptide
  XENP017903 vlCDR3
FQGSHVPFT

SEQ ID NO: 16201 - protein, 449 aa, Artificial Sequence
  Description of Artificial Sequence: Synthetic polypeptide
  XENP017904 1C7_H1L1_IgG1_PVA_/S267K Heavy Chain
EVQLLESGGGLVQPGGSLRLSCAASGFAFSSYDMSWVRQAPGKRLEWVSYISSGGGSTYYPDSVKGRFTISRDNSKNTLYLQMNSLRAEDTAVYYCARPLDDYYAPFAYWGQGTLVTVSSASTKGPSVFPLAPSSKSTSGGTAALGCLVKDYFPEPVTVSWNSGALTSGVHTFPAVLQSSGLYSLSSVVTVPSSSLGTQTYICNVNHKPSNTKVDKKVEPKSCDKTHTCPPCPAPPVAGPSVFLFPPKPKDTLMISRTPEVTCVVVDVKHEDPEVKFNWYVDGVEVHNAKTKPREEQYNSTYRVVSVLTVLHQDWLNGKEYKCKVSNKALPAPIEKTISKAKGQPREPQVYTLPPSREEMTKNQVSLTCLVKGFYPSDIAVEWESNGQPENNYKTTPPVLDSDGSFFLYSKLTVDKSRWQQGNVFSCSVMHEALHNHYTQKSLSLSPGK

SEQ ID NO: 16202 - protein, 120 aa, Artificial Sequence; identical to SEQ ID NO: 10904
  Description of Artificial Sequence: Synthetic polypeptide
  VH of XENP017904

SEQ ID NO: 16203 - protein, 5 aa, Artificial Sequence
  Description of Artificial Sequence: Synthetic peptide
  XENP017904 vhCDR1
SYDMS

SEQ ID NO: 16204 - protein, 17 aa, Artificial Sequence
  Description of Artificial Sequence: Synthetic peptide
  XENP017904 vhCDR2
YISSGGGSTYYPDSVKG

SEQ ID NO: 16205 - protein, 11 aa, Artificial Sequence
  Description of Artificial Sequence: Synthetic peptide
  XENP017904 vhCDR3
PLDDYYAPFAY

SEQ ID NO: 16206 - protein, 218 aa, Artificial Sequence
  Description of Artificial Sequence: Synthetic polypeptide
  XENP017904 1C7_H1L1_IgG1_PVA_/S267K Light Chain
DIVLTQSPSSLSASVGDRVTITCRASESVDNDGISFMNWFQQKPGKPPKLLIYAASNQGSGVPARFSGSGSGTDFTLTISSLQPEDFATYFCQQSKEVPWTFGGGTKVEIKRTVAAPSVFIFPPSDEQLKSGTASVVCLLNNFYPREAKVQWKVDNALQSGNSQESVTEQDSKDSTYSLSSTLTLSKADYEKHKVYACEVTHQGLSSPVTKSFNRGEC

SEQ ID NO: 16207 - protein, 111 aa, Artificial Sequence; identical to SEQ ID NO: 10905
  Description of Artificial Sequence: Synthetic polypeptide
  VL of XENP017904

SEQ ID NO: 16208 - protein, 15 aa, Artificial Sequence
  Description of Artificial Sequence: Synthetic peptide
  XENP017904 vlCDR1
RASESVDNDGISFMN

SEQ ID NO: 16209 - protein, 7 aa, Artificial Sequence
  Description of Artificial Sequence: Synthetic peptide
  XENP017904 vlCDR2
AASNQGS

SEQ ID NO: 16210 - protein, 9 aa, Artificial Sequence
  Description of Artificial Sequence: Synthetic peptide
  XENP017904 vlCDR3
QQSKEVPWT

SEQ ID NO: 16211 - protein, 443 aa, Artificial Sequence
  Description of Artificial Sequence: Synthetic polypeptide
  XENP017905 1G2_H1L1_IgG1_PVA_/S267K Heavy Chain
QVQLVQSGAEVKKPGASVKVSCKVSGFSLTDYGVNWVRQAPGQGLEWMGMIWGDGSTDYNSKFQGRVTMTKDISTSTVYMELSSLRSEDTAVYYCAREYAMDYWGQGTLVTVSSASTKGPSVFPLAPSSKSTSGGTAALGCLVKDYFPEPVTVSWNSGALTSGVHTFPAVLQSSGLYSLSSVVTVPSSSLGTQTYICNVNHKPSNTKVDKKVEPKSCDKTHTCPPCPAPPVAGPSVFLFPPKPKDTLMISRTPEVTCVVVDVKHEDPEVKFNWYVDGVEVHNAKTKPREEQYNSTYRVVSVLTVLHQDWLNGKEYKCKVSNKALPAPIEKTISKAKGQPREPQVYTLPPSREEMTKNQVSLTCLVKGFYPSDIAVEWESNGQPENNYKTTPPVLDSDGSFFLYSKLTVDKSRWQQGNVFSCSVMHEALHNHYTQKSLSLSPGK

SEQ ID NO: 16212 - protein, 114 aa, Artificial Sequence; identical to SEQ ID NO: 10913
  Description of Artificial Sequence: Synthetic polypeptide
  VH of XENP017905

SEQ ID NO: 16213 - protein, 5 aa, Artificial Sequence
  Description of Artificial Sequence: Synthetic peptide
  XENP017905 vhCDR1
DYGVN

SEQ ID NO: 16214 - protein, 16 aa, Artificial Sequence
  Description of Artificial Sequence: Synthetic peptide
  XENP017905 vhCDR2
MIWGDGSTDYNSKFQG

SEQ ID NO: 16215 - protein, 6 aa, Artificial Sequence
  Description of Artificial Sequence: Synthetic peptide
  XENP017905 vhCDR3
EYAMDY

SEQ ID NO: 16216 - protein, 219 aa, Artificial Sequence
  Description of Artificial Sequence: Synthetic polypeptide
  XENP017905 1G2_H1L1_IgG1_PVA_/S267K Light Chain
DIVMTQSPDSLAVSLGERATINCKSSQSLLNSRTRKNYLAWYQQKPGQSPKLLIFWASTRESGVPDRFTGSGSGTDFTLTISSLQAEDVAVYYCKQSYNLRTFGGGTKVEIKRTVAAPSVFIFPPSDEQLKSGTASVVCLLNNFYPREAKVQWKVDNALQSGNSQESVTEQDSKDSTYSLSSTLTLSKADYEKHKVYACEVTHQGLSSPVTKSFNRGEC

SEQ ID NO: 16217 - protein, 112 aa, Artificial Sequence; identical to SEQ ID NO: 10914
  Description of Artificial Sequence: Synthetic polypeptide
  VL of XENP017905

SEQ ID NO: 16218 - protein, 17 aa, Artificial Sequence
  Description of Artificial Sequence: Synthetic peptide
  XENP017905 vlCDR1
KSSQSLLNSRTRKNYLA

SEQ ID NO: 16219 - protein, 7 aa, Artificial Sequence
  Description of Artificial Sequence: Synthetic peptide
  XENP017905 vlCDR2
WASTRES

SEQ ID NO: 16220 - protein, 8 aa, Artificial Sequence
  Description of Artificial Sequence: Synthetic peptide
  XENP017905 vlCDR3
KQSYNLRT

SEQ ID NO: 16221 - protein, 451 aa, Artificial Sequence
  Description of Artificial Sequence: Synthetic polypeptide
  XENP017906 1G6_H1L1_IgG1_PVA_/S267K Heavy Chain
EVQLVESGGGLVKPGGSLRLSCAASGFTFSNYWMNWVRQAPGKGLEWVGEIRLKSNNYATHYAEPVKGRFTISRDDSKSTVYLQMNSLKTEDTAVYYCTRYYGNYGGYFDVWGAGTLVTVSSASTKGPSVFPLAPSSKSTSGGTAALGCLVKDYFPEPVTVSWNSGALTSGVHTFPAVLQSSGLYSLSSVVTVPSSSLGTQTYICNVNHKPSNTKVDKKVEPKSCDKTHTCPPCPAPPVAGPSVFLFPPKPKDTLMISRTPEVTCVVVDVKHEDPEVKFNWYVDGVEVHNAKTKPREEQYNSTYRVVSVLTVLHQDWLNGKEYKCKVSNKALPAPIEKTISKAKGQPREPQVYTLPPSREEMTKNQVSLTCLVKGFYPSDIAVEWESNGQPENNYKTTPPVLDSDGSFFLYSKLTVDKSRWQQGNVFSCSVMHEALHNHYTQKSLSLSPGK

SEQ ID NO: 16222 - protein, 122 aa, Artificial Sequence; identical to SEQ ID NO: 10922
  Description of Artificial Sequence: Synthetic polypeptide
  VH of XENP017906

SEQ ID NO: 16223 - protein, 5 aa, Artificial Sequence
  Description of Artificial Sequence: Synthetic peptide
  XENP017906 vhCDR1
NYWMN

SEQ ID NO: 16224 - protein, 19 aa, Artificial Sequence
  Description of Artificial Sequence: Synthetic peptide
  XENP017906 vhCDR2
EIRLKSNNYATHYAEPVKG

SEQ ID NO: 16225 - protein, 11 aa, Artificial Sequence
  Description of Artificial Sequence: Synthetic peptide
  XENP017906 vhCDR3
YYGNYGGYFDV

SEQ ID NO: 16226 - protein, 214 aa, Artificial Sequence
  Description of Artificial Sequence: Synthetic polypeptide
  XENP017906 1G6_H1L1_IgG1_PVA_/S267K Light Chain
SIVMTQSPATLSVSPGERATLSCRASQSVSNDVAWYQQKPGQSPRLLINYASHRYTGVPDRFTGSGYGTEFTLTISSLQSEDFAVYFCQQDYSSPRTFGGGTKVEIKRTVAAPSVFIFPPSDEQLKSGTASVVCLLNNFYPREAKVQWKVDNALQSGNSQESVTEQDSKDSTYSLSSTLTLSKADYEKHKVYACEVTHQGLSSPVTKSFNRGEC

SEQ ID NO: 16227 - protein, 107 aa, Artificial Sequence; identical to SEQ ID NO: 10923
  Description of Artificial Sequence: Synthetic polypeptide
  VL of XENP017906

SEQ ID NO: 16228 - protein, 11 aa, Artificial Sequence
  Description of Artificial Sequence: Synthetic peptide
  XENP017906 vlCDR1
RASQSVSNDVA

SEQ ID NO: 16229 - protein, 7 aa, Artificial Sequence
  Description of Artificial Sequence: Synthetic peptide
  XENP017906 vlCDR2
YASHRYT

SEQ ID NO: 16230 - protein, 9 aa, Artificial Sequence
  Description of Artificial Sequence: Synthetic peptide
  XENP017906 vlCDR3
QQDYSSPRT

SEQ ID NO: 16231 - protein, 451 aa, Artificial Sequence; identical to SEQ ID NO: 16221
  Description of Artificial Sequence: Synthetic polypeptide
  XENP017907 1G6_H1L2_IgG1_PVA_/S267K Heavy Chain

SEQ ID NO: 16232 - protein, 122 aa, Artificial Sequence; identical to SEQ ID NO: 10922
  Description of Artificial Sequence: Synthetic polypeptide
  VH of XENP017907

SEQ ID NO: 16233 - protein, 5 aa, Artificial Sequence
  Description of Artificial Sequence: Synthetic peptide
  XENP017907 vhCDR1
NYWMN

SEQ ID NO: 16234 - protein, 19 aa, Artificial Sequence
  Description of Artificial Sequence: Synthetic peptide
  XENP017907 vhCDR2
EIRLKSNNYATHYAEPVKG

SEQ ID NO: 16235 - protein, 11 aa, Artificial Sequence
  Description of Artificial Sequence: Synthetic peptide
  XENP017907 vhCDR3
YYGNYGGYFDV

SEQ ID NO: 16236 - protein, 214 aa, Artificial Sequence
  Description of Artificial Sequence: Synthetic polypeptide
  XENP017907 1G6_H1L2_IgG1_PVA_/S267K Light Chain
SIVMTQSPSSLSASVGDRVTITCRASQSVSNDVAWYQQKPGKSPKLLINYASHRYTGVPDRFTGSGYGTDFTLTISSLQPEDFATYFCQQDYSSPRTFGGGTKVEIKRTVAAPSVFIFPPSDEQLKSGTASVVCLLNNFYPREAKVQWKVDNALQSGNSQESVTEQDSKDSTYSLSSTLTLSKADYEKHKVYACEVTHQGLSSPVTKSFNRGEC

SEQ ID NO: 16237 - protein, 107 aa, Artificial Sequence; identical to SEQ ID NO: 10932
  Description of Artificial Sequence: Synthetic polypeptide
  VL of XENP017907

SEQ ID NO: 16238 - protein, 11 aa, Artificial Sequence
  Description of Artificial Sequence: Synthetic peptide
  XENP017907 vlCDR1
RASQSVSNDVA

SEQ ID NO: 16239 - protein, 7 aa, Artificial Sequence
  Description of Artificial Sequence: Synthetic peptide
  XENP017907 vlCDR2
YASHRYT

SEQ ID NO: 16240 - protein, 9 aa, Artificial Sequence
  Description of Artificial Sequence: Synthetic peptide
  XENP017907 vlCDR3
QQDYSSPRT

SEQ ID NO: 16241 - protein, 444 aa, Artificial Sequence
  Description of Artificial Sequence: Synthetic polypeptide
  XENP017908 2A2_H1L1_IgG1_PVA_/S267K Heavy Chain
QVQLVQSGAEVKKPGASVKVSCKASGYTFTNYWMHWVRQAPGQGLEWMGYINPSTGYTEYNQKFQGRVTMTADKSTSTAYMELSSLRSEDTAVYYCATGNYFAYWGQGTLVTVSSASTKGPSVFPLAPSSKSTSGGTAALGCLVKDYFPEPVTVSWNSGALTSGVHTFPAVLQSSGLYSLSSVVTVPSSSLGTQTYICNVNHKPSNTKVDKKVEPKSCDKTHTCPPCPAPPVAGPSVFLFPPKPKDTLMISRTPEVTCVVVDVKHEDPEVKFNWYVDGVEVHNAKTKPREEQYNSTYRVVSVLTVLHQDWLNGKEYKCKVSNKALPAPIEKTISKAKGQPREPQVYTLPPSREEMTKNQVSLTCLVKGFYPSDIAVEWESNGQPENNYKTTPPVLDSDGSFFLYSKLTVDKSRWQQGNVFSCSVMHEALHNHYTQKSLSLSPGK

SEQ ID NO: 16242 - protein, 115 aa, Artificial Sequence; identical to SEQ ID NO: 10940
  Description of Artificial Sequence: Synthetic polypeptide
  VH of XENP017908

SEQ ID NO: 16243 - protein, 5 aa, Artificial Sequence
  Description of Artificial Sequence: Synthetic peptide
  XENP017908 vhCDR1
NYWMH

SEQ ID NO: 16244 - protein, 17 aa, Artificial Sequence
  Description of Artificial Sequence: Synthetic peptide
  XENP017908 vhCDR2
YINPSTGYTEYNQKFQG

SEQ ID NO: 16245 - protein, 6 aa, Artificial Sequence
  Description of Artificial Sequence: Synthetic peptide
  XENP017908 vhCDR3
GNYFAY

SEQ ID NO: 16246 - protein, 214 aa, Artificial Sequence
  Description of Artificial Sequence: Synthetic polypeptide
  XENP017908 2A2_H1L1_IgG1_PVA_/S267K Light Chain
DIQMTQSPSSLSASVGDRVTITCRPSESLYSYLAWYQQKPGKSPKLLVYNAKTLVEGVPSRFSGSGSGTDFTLTISSLQPEDFATYYCQHHYGTPFTFGSGTKLEIKRTVAAPSVFIFPPSDEQLKSGTASVVCLLNNFYPREAKVQWKVDNALQSGNSQESVTEQDSKDSTYSLSSTLTLSKADYEKHKVYACEVTHQGLSSPVTKSFNRGEC

SEQ ID NO: 16247 - protein, 107 aa, Artificial Sequence; identical to SEQ ID NO: 10941
  Description of Artificial Sequence: Synthetic polypeptide
  VL of XENP017908

SEQ ID NO: 16248 - protein, 11 aa, Artificial Sequence
  Description of Artificial Sequence: Synthetic peptide
  XENP017908 vlCDR1
RPSESLYSYLA

SEQ ID NO: 16249 - protein, 7 aa, Artificial Sequence
  Description of Artificial Sequence: Synthetic peptide
  XENP017908 vlCDR2
NAKTLVE

SEQ ID NO: 16250 - protein, 9 aa, Artificial Sequence
  Description of Artificial Sequence: Synthetic peptide
  XENP017908 vlCDR3
QHHYGTPFT

SEQ ID NO: 16251 - protein, 449 aa, Artificial Sequence
  Description of Artificial Sequence: Synthetic polypeptide
  XENP017909 2F11_H1L1_IgG1_PVA_/S267K Heavy Chain
QVQLVQSGAEVKKPGASVKVSCKGSGYTFTDYVMHWVRQAPGQSLEWMGVISTYYGDASYNQKFQGRVTMTVDKSTSTAYMELSSLRSEDTAVYYCAREGYDGYLYFDVWGAGTLVTVSSASTKGPSVFPLAPSSKSTSGGTAALGCLVKDYFPEPVTVSWNSGALTSGVHTFPAVLQSSGLYSLSSVVTVPSSSLGTQTYICNVNHKPSNTKVDKKVEPKSCDKTHTCPPCPAPPVAGPSVFLFPPKPKDTLMISRTPEVTCVVVDVKHEDPEVKFNWYVDGVEVHNAKTKPREEQYNSTYRVVSVLTVLHQDWLNGKEYKCKVSNKALPAPIEKTISKAKGQPREPQVYTLPPSREEMTKNQVSLTCLVKGFYPSDIAVEWESNGQPENNYKTTPPVLDSDGSFFLYSKLTVDKSRWQQGNVFSCSVMHEALHNHYTQKSLSLSPGK

SEQ ID NO: 16252 - protein, 120 aa, Artificial Sequence; identical to SEQ ID NO: 10949
  Description of Artificial Sequence: Synthetic polypeptide
  VH of XENP017909

SEQ ID NO: 16253 - protein, 5 aa, Artificial Sequence
  Description of Artificial Sequence: Synthetic peptide
  XENP017909 vhCDR1
DYVMH

SEQ ID NO: 16254 - protein, 17 aa, Artificial Sequence
  Description of Artificial Sequence: Synthetic peptide
  XENP017909 vhCDR2
VISTYYGDASYNQKFQG

SEQ ID NO: 16255 - protein, 11 aa, Artificial Sequence
  Description of Artificial Sequence: Synthetic peptide
  XENP017909 vhCDR3
EGYDGYLYFDV

SEQ ID NO: 16256 - protein, 219 aa, Artificial Sequence
  Description of Artificial Sequence: Synthetic polypeptide
  XENP017909 2F11_H1L1_IgG1_PVA_/S267K Light Chain
DVLMTQTPLSSPVTLGQPASISCRSSQSIVHSNGNTYLEWYQQRPGQSPRLLIYKVSNRFSGVPDRFSGSGSGTDFTLKISRVEAEDVGVYYCFQGSHVPYTFGGGTKVEIKRTVAAPSVFIFPPSDEQLKSGTASVVCLLNNFYPREAKVQWKVDNALQSGNSQESVTEQDSKDSTYSLSSTLTLSKADYEKHKVYACEVTHQGLSSPVTKSFNRGEC

SEQ ID NO: 16257 - protein, 112 aa, Artificial Sequence; identical to SEQ ID NO: 10950
  Description of Artificial Sequence: Synthetic polypeptide
  VL of XENP017909

SEQ ID NO: 16258 - protein, 16 aa, Artificial Sequence
  Description of Artificial Sequence: Synthetic peptide
  XENP017909 vlCDR1
RSSQSIVHSNGNTYLE

SEQ ID NO: 16259 - protein, 7 aa, Artificial Sequence
  Description of Artificial Sequence: Synthetic peptide
  XENP017909 vlCDR2
KVSNRFS

SEQ ID NO: 16260 - protein, 9 aa, Artificial Sequence
  Description of Artificial Sequence: Synthetic peptide
  XENP017909 vlCDR3
FQGSHVPYT

SEQ ID NO: 16261 - protein, 449 aa, Artificial Sequence
  Description of Artificial Sequence: Synthetic polypeptide
  XENP017910 5H1_H1L1_IgG1_PVA_/S267K Heavy Chain
QVQLVQSGAEVKKPGASVKVSCKGSGYTFTDYVMHWVRQAPGQSLEWMGVISIHYGDGRYNQKFQGRVTMTVDKSTSTAYMELSSLRSEDTAVYYCAREVYDGYLYFDVWGAGTLVTVSSASTKGPSVFPLAPSSKSTSGGTAALGCLVKDYFPEPVTVSWNSGALTSGVHTFPAVLQSSGLYSLSSVVTVPSSSLGTQTYICNVNHKPSNTKVDKKVEPKSCDKTHTCPPCPAPPVAGPSVFLFPPKPKDTLMISRTPEVTCVVVDVKHEDPEVKFNWYVDGVEVHNAKTKPREEQYNSTYRVVSVLTVLHQDWLNGKEYKCKVSNKALPAPIEKTISKAKGQPREPQVYTLPPSREEMTKNQVSLTCLVKGFYPSDIAVEWESNGQPENNYKTTPPVLDSDGSFFLYSKLTVDKSRWQQGNVFSCSVMHEALHNHYTQKSLSLSPGK

SEQ ID NO: 16262 - protein, 120 aa, Artificial Sequence; identical to SEQ ID NO: 10958
  Description of Artificial Sequence: Synthetic polypeptide
  VH of XENP017910

SEQ ID NO: 16263 - protein, 5 aa, Artificial Sequence
  Description of Artificial Sequence: Synthetic peptide
  XENP017910 vhCDR1
DYVMH

SEQ ID NO: 16264 - protein, 17 aa, Artificial Sequence
  Description of Artificial Sequence: Synthetic peptide
  XENP017910 vhCDR2
VISIHYGDGRYNQKFQG

SEQ ID NO: 16265 - protein, 11 aa, Artificial Sequence
  Description of Artificial Sequence: Synthetic peptide
  XENP017910 vhCDR3
EVYDGYLYFDV

SEQ ID NO: 16266 - protein, 219 aa, Artificial Sequence
  Description of Artificial Sequence: Synthetic polypeptide
  XENP017910 5H1_H1L1_IgG1_PVA_/S267K Light Chain
DVLMTQSPLSLPVTPGEPASISCRSSQSIVHSNGNTYLEWYLQKPGQSPQLLIYKVSNRFSGVPDRFGGRGSGTDFTLKISRVEAEDVGVYYCFQGSHVPYTFGGGTKVEIKRTVAAPSVFIFPPSDEQLKSGTASVVCLLNNFYPREAKVQWKVDNALQSGNSQESVTEQDSKDSTYSLSSTLTLSKADYEKHKVYACEVTHQGLSSPVTKSFNRGEC

SEQ ID NO: 16267 - protein, 112 aa, Artificial Sequence; identical to SEQ ID NO: 10959
  Description of Artificial Sequence: Synthetic polypeptide
  VL of XENP017910

SEQ ID NO: 16268 - protein, 16 aa, Artificial Sequence
  Description of Artificial Sequence: Synthetic peptide
  XENP017910 vlCDR1
RSSQSIVHSNGNTYLE

SEQ ID NO: 16269 - protein, 7 aa, Artificial Sequence
  Description of Artificial Sequence: Synthetic peptide
  XENP017910 vlCDR2
KVSNRFS

SEQ ID NO: 16270 - protein, 9 aa, Artificial Sequence
  Description of Artificial Sequence: Synthetic peptide
  XENP017910 vlCDR3
FQGSHVPYT

SEQ ID NO: 16271 - protein, 449 aa, Artificial Sequence; identical to SEQ ID NO: 16261
  Description of Artificial Sequence: Synthetic polypeptide
  XENP017911 5H1_H1L2_IgG1_PVA_/S267K Heavy Chain

SEQ ID NO: 16272 - protein, 120 aa, Artificial Sequence; identical to SEQ ID NO: 10958
  Description of Artificial Sequence: Synthetic polypeptide
  VH of XENP017911

SEQ ID NO: 16273 - protein, 5 aa, Artificial Sequence
  Description of Artificial Sequence: Synthetic peptide
  XENP017911 vhCDR1
DYVMH

SEQ ID NO: 16274 - protein, 17 aa, Artificial Sequence
  Description of Artificial Sequence: Synthetic peptide
  XENP017911 vhCDR2
VISIHYGDGRYNQKFQG

SEQ ID NO: 16275 - protein, 11 aa, Artificial Sequence
  Description of Artificial Sequence: Synthetic peptide
  XENP017911 vhCDR3
EVYDGYLYFDV

SEQ ID NO: 16276 - protein, 219 aa, Artificial Sequence
  Description of Artificial Sequence: Synthetic polypeptide
  XENP017911 5H1_H1L2_IgG1_PVA_/S267K Light Chain
DVLMTQSPLSLPVTLGQPASISCRSSQSIVHSNGNTYLEWYQQRPGQSPRLLIYKVSNRFSGVPDRFGGRGSGTDFTLKISRVEAEDVGVYYCFQGSHVPYTFGGGTKVEIKRTVAAPSVFIFPPSDEQLKSGTASVVCLLNNFYPREAKVQWKVDNALQSGNSQESVTEQDSKDSTYSLSSTLTLSKADYEKHKVYACEVTHQGLSSPVTKSFNRGEC

SEQ ID NO: 16277 - protein, 112 aa, Artificial Sequence; identical to SEQ ID NO: 10968
  Description of Artificial Sequence: Synthetic polypeptide
  VL of XENP017911

SEQ ID NO: 16278 - protein, 16 aa, Artificial Sequence
  Description of Artificial Sequence: Synthetic peptide
  XENP017911 vlCDR1
RSSQSIVHSNGNTYLE

SEQ ID NO: 16279 - protein, 7 aa, Artificial Sequence
  Description of Artificial Sequence: Synthetic peptide
  XENP017911 vlCDR2
KVSNRFS

SEQ ID NO: 16280 - protein, 9 aa, Artificial Sequence
  Description of Artificial Sequence: Synthetic peptide
  XENP017911 vlCDR3
FQGSHVPYT

SEQ ID NO: 16281 - protein, 449 aa, Artificial Sequence
  Description of Artificial Sequence: Synthetic polypeptide
  XENP017912 10E4_H1L1_IgG1_PVA_/S267K Heavy Chain
QVQLVQSGAEVKKPGASVKVSCKASGYSFTSYWMHWVRQAPGQGLEWMGAIYPGNSDTSYNQKFQGRVTMTADTSTSTAYMELSSLRSEDTAVYYCTRDGNYVRYYFDYWGQGTLVTVSSASTKGPSVFPLAPSSKSTSGGTAALGCLVKDYFPEPVTVSWNSGALTSGVHTFPAVLQSSGLYSLSSVVTVPSSSLGTQTYICNVNHKPSNTKVDKKVEPKSCDKTHTCPPCPAPPVAGPSVFLFPPKPKDTLMISRTPEVTCVVVDVKHEDPEVKFNWYVDGVEVHNAKTKPREEQYNSTYRVVSVLTVLHQDWLNGKEYKCKVSNKALPAPIEKTISKAKGQPREPQVYTLPPSREEMTKNQVSLTCLVKGFYPSDIAVEWESNGQPENNYKTTPPVLDSDGSFFLYSKLTVDKSRWQQGNVFSCSVMHEALHNHYTQKSLSLSPGK

SEQ ID NO: 16282 - protein, 120 aa, Artificial Sequence; identical to SEQ ID NO: 10976
  Description of Artificial Sequence: Synthetic polypeptide
  VH of XENP017912

SEQ ID NO: 16283 - protein, 5 aa, Artificial Sequence
  Description of Artificial Sequence: Synthetic peptide
  XENP017912 vhCDR1
SYWMH

SEQ ID NO: 16284 - protein, 17 aa, Artificial Sequence
  Description of Artificial Sequence: Synthetic peptide
  XENP017912 vhCDR2
AIYPGNSDTSYNQKFQG

SEQ ID NO: 16285 - protein, 11 aa, Artificial Sequence
  Description of Artificial Sequence: Synthetic peptide
  XENP017912 vhCDR3
DGNYVRYYFDY

SEQ ID NO: 16286 - protein, 214 aa, Artificial Sequence
  Description of Artificial Sequence: Synthetic polypeptide
  XENP017912 10E4_H1L1_IgG1_PVA_/S267K Light Chain
DIQMTQSPSSLSASVGDRVTITCRASQDIGSNLNWLQQKPGKTIKRLIYATSNLDSGVPKRFSGRRSGSDYTLTISSLQPEDFATYYCLQYASSPLTFGTGTKLEIKRTVAAPSVFIFPPSDEQLKSGTASVVCLLNNFYPREAKVQWKVDNALQSGNSQESVTEQDSKDSTYSLSSTLTLSKADYEKHKVYACEVTHQGLSSPVTKSFNRGEC

SEQ ID NO: 16287 - protein, 107 aa, Artificial Sequence; identical to SEQ ID NO: 10977
  Description of Artificial Sequence: Synthetic polypeptide
  VL of XENP017912

SEQ ID NO: 16288 - protein, 11 aa, Artificial Sequence
  Description of Artificial Sequence: Synthetic peptide
  XENP017912 vlCDR1
RASQDIGSNLN

SEQ ID NO: 16289 - protein, 7 aa, Artificial Sequence
  Description of Artificial Sequence: Synthetic peptide
  XENP017912 vlCDR2
ATSNLDS

SEQ ID NO: 16290 - protein, 9 aa, Artificial Sequence
  Description of Artificial Sequence: Synthetic peptide
  XENP017912 vlCDR3
LQYASSPLT

SEQ ID NO: 16291 - protein, 449 aa, Artificial Sequence
  Description of Artificial Sequence: Synthetic polypeptide
  XENP017913 4C11_H1L1_IgG1_PVA_/S267K Heavy Chain
QIQLVQSGAEVKKPGASVKVSCKASGYTFTSYWMHWVRQAPGQGLEWMGAIYPGNSDTSYNQKFQGRVTMTADTSTSTAYMELSSLRSEDTAVYYCTNLYYGSSFAMDYWGQGTLVTVSSASTKGPSVFPLAPSSKSTSGGTAALGCLVKDYFPEPVTVSWNSGALTSGVHTFPAVLQSSGLYSLSSVVTVPSSSLGTQTYICNVNHKPSNTKVDKKVEPKSCDKTHTCPPCPAPPVAGPSVFLFPPKPKDTLMISRTPEVTCVVVDVKHEDPEVKFNWYVDGVEVHNAKTKPREEQYNSTYRVVSVLTVLHQDWLNGKEYKCKVSNKALPAPIEKTISKAKGQPREPQVYTLPPSREEMTKNQVSLTCLVKGFYPSDIAVEWESNGQPENNYKTTPPVLDSDGSFFLYSKLTVDKSRWQQGNVFSCSVMHEALHNHYTQKSLSLSPGK

SEQ ID NO: 16292 - protein, 120 aa, Artificial Sequence; identical to SEQ ID NO: 10985
  Description of Artificial Sequence: Synthetic polypeptide
  VH of XENP017913

SEQ ID NO: 16293 - protein, 5 aa, Artificial Sequence
  Description of Artificial Sequence: Synthetic peptide
  XENP017913 vhCDR1
SYWMH

SEQ ID NO: 16294 - protein, 17 aa, Artificial Sequence
  Description of Artificial Sequence: Synthetic peptide
  XENP017913 vhCDR2
AIYPGNSDTSYNQKFQG

SEQ ID NO: 16295 - protein, 11 aa, Artificial Sequence
  Description of Artificial Sequence: Synthetic peptide
  XENP017913 vhCDR3
LYYGSSFAMDY

SEQ ID NO: 16296 - protein, 214 aa, Artificial Sequence
  Description of Artificial Sequence: Synthetic polypeptide
  XENP017913 4C11_H1L1_IgG1_PVA_/S267K Light Chain
DIKMTQSPSSLSASVGDRVTITCRASQDINTYLSWFQQKPGKSPKTLIYRANRLVDGVPSRFSGSGSGQDYTLTISSLQPEDFATYYCLHYDDFPYTFGGGTKVEIKRTVAAPSVFIFPPSDEQLKSGTASVVCLLNNFYPREAKVQWKVDNALQSGNSQESVTEQDSKDSTYSLSSTLTLSKADYEKHKVYACEVTHQGLSSPVTKSFNRGEC

SEQ ID NO: 16297 - protein, 107 aa, Artificial Sequence; identical to SEQ ID NO: 10986
  Description of Artificial Sequence: Synthetic polypeptide
  VL of XENP017913

SEQ ID NO: 16298 - protein, 11 aa, Artificial Sequence
  Description of Artificial Sequence: Synthetic peptide
  XENP017913 vlCDR1
RASQDINTYLS

SEQ ID NO: 16299 - protein, 7 aa, Artificial Sequence
  Description of Artificial Sequence: Synthetic peptide
  XENP017913 vlCDR2
RANRLVD

SEQ ID NO: 16300 - protein, 9 aa, Artificial Sequence
  Description of Artificial Sequence: Synthetic peptide
  XENP017913 vlCDR3
LHYDDFPYT

SEQ ID NO: 16301 - protein, 446 aa, Artificial Sequence
  Description of Artificial Sequence: Synthetic polypeptide
  XENP017914 6A3_H1L1_IgG1_PVA_/S267K Heavy Chain
EVQLLESGGGLVQPGGSLRLSCAASGFTFSSYGMSWVRQAPGKRLEWVSTISGGGRYTYYPDSVKGRFTISRDNSKNTLYLQMNSLRAEDTAVYYCASYYDSSFDYWGQGTLVTVSSASTKGPSVFPLAPSSKSTSGGTAALGCLVKDYFPEPVTVSWNSGALTSGVHTFPAVLQSSGLYSLSSVVTVPSSSLGTQTYICNVNHKPSNTKVDKKVEPKSCDKTHTCPPCPAPPVAGPSVFLFPPKPKDTLMISRTPEVTCVVVDVKHEDPEVKFNWYVDGVEVHNAKTKPREEQYNSTYRVVSVLTVLHQDWLNGKEYKCKVSNKALPAPIEKTISKAKGQPREPQVYTLPPSREEMTKNQVSLTCLVKGFYPSDIAVEWESNGQPENNYKTTPPVLDSDGSFFLYSKLTVDKSRWQQGNVFSCSVMHEALHNHYTQKSLSLSPGK

SEQ ID NO: 16302 - protein, 117 aa, Artificial Sequence; identical to SEQ ID NO: 10994
  Description of Artificial Sequence: Synthetic polypeptide
  VH of XENP017914

SEQ ID NO: 16303 - protein, 5 aa, Artificial Sequence
  Description of Artificial Sequence: Synthetic peptide
  XENP017914 vhCDR1
SYGMS

SEQ ID NO: 16304 - protein, 17 aa, Artificial Sequence
  Description of Artificial Sequence: Synthetic peptide
  XENP017914 vhCDR2
TISGGGRYTYYPDSVKG

SEQ ID NO: 16305 - protein, 8 aa, Artificial Sequence
  Description of Artificial Sequence: Synthetic peptide
  XENP017914 vhCDR3
YYDSSFDY

SEQ ID NO: 16306 - protein, 214 aa, Artificial Sequence
  Description of Artificial Sequence: Synthetic polypeptide
  XENP017914 6A3_H1L1_IgG1_PVA_/S267K Light Chain
DIVMTQSPDSLAVSLGERATINCKASQDVGTAVAWYQQKPGQSPKLLIYWASTRHTGVPDRFTGSGSGTDFTLTISSLQAEDVAVYFCQHYSIYPWTFGGGTKVEIKRTVAAPSVFIFPPSDEQLKSGTASVVCLLNNFYPREAKVQWKVDNALQSGNSQESVTEQDSKDSTYSLSSTLTLSKADYEKHKVYACEVTHQGLSSPVTKSFNRGEC

SEQ ID NO: 16307 - protein, 107 aa, Artificial Sequence; identical to SEQ ID NO: 10995
  Description of Artificial Sequence: Synthetic polypeptide
  VL of XENP017914

SEQ ID NO: 16308 - protein, 11 aa, Artificial Sequence
  Description of Artificial Sequence: Synthetic peptide
  XENP017914 vlCDR1
KASQDVGTAVA

SEQ ID NO: 16309 - protein, 7 aa, Artificial Sequence
  Description of Artificial Sequence: Synthetic peptide
  XENP017914 vlCDR2
WASTRHT

SEQ ID NO: 16310 - protein, 9 aa, Artificial Sequence
  Description of Artificial Sequence: Synthetic peptide
  XENP017914 vlCDR3
QHYSIYPWT

SEQ ID NO: 16311 - protein, 446 aa, Artificial Sequence; identical to SEQ ID NO: 16301
  Description of Artificial Sequence: Synthetic polypeptide
  XENP017915 6A3_H1L2_IgG1_PVA_/S267K Heavy Chain

SEQ ID NO: 16312 - protein, 117 aa, Artificial Sequence; identical to SEQ ID NO: 10994
  Description of Artificial Sequence: Synthetic polypeptide
  VH of XENP017915

SEQ ID NO: 16313 - protein, 5 aa, Artificial Sequence
  Description of Artificial Sequence: Synthetic peptide
  XENP017915 vhCDR1
SYGMS

SEQ ID NO: 16314 - protein, 17 aa, Artificial Sequence
  Description of Artificial Sequence: Synthetic peptide
  XENP017915 vhCDR2
TISGGGRYTYYPDSVKG

SEQ ID NO: 16315 - protein, 8 aa, Artificial Sequence
  Description of Artificial Sequence: Synthetic peptide
  XENP017915 vhCDR3
YYDSSFDY

SEQ ID NO: 16316 - protein, 214 aa, Artificial Sequence
  Description of Artificial Sequence: Synthetic polypeptide
  XENP017915 6A3_H1L2_IgG1_PVA_/S267K Light Chain
DIVMTQSPATLSVSPGERATLSCRASQDVGTAVAWYQQKPGQSPRLLIYWASTRHTGVPDRFTGSGSGTEFTLTISSLQSEDFAVYFCQHYSIYPWTFGGGTKVEIKRTVAAPSVFIFPPSDEQLKSGTASVVCLLNNFYPREAKVQWKVDNALQSGNSQESVTEQDSKDSTYSLSSTLTLSKADYEKHKVYACEVTHQGLSSPVTKSFNRGEC

SEQ ID NO: 16317 - protein, 107 aa, Artificial Sequence; identical to SEQ ID NO: 11004
  Description of Artificial Sequence: Synthetic polypeptide
  VL of XENP017915

SEQ ID NO: 16318 - protein, 11 aa, Artificial Sequence
  Description of Artificial Sequence: Synthetic peptide
  XENP017915 vlCDR1
RASQDVGTAVA

SEQ ID NO: 16319 - protein, 7 aa, Artificial Sequence
  Description of Artificial Sequence: Synthetic peptide
  XENP017915 vlCDR2
WASTRHT

SEQ ID NO: 16320 - protein, 9 aa, Artificial Sequence
  Description of Artificial Sequence: Synthetic peptide
  XENP017915 vlCDR3
QHYSIYPWT

SEQ ID NO: 16321 - protein, 446 aa, Artificial Sequence; identical to SEQ ID NO: 16301
  Description of Artificial Sequence: Synthetic polypeptide
  XENP017916 6A3_H1L3_IgG1_PVA_/S267K Heavy Chain

SEQ ID NO: 16322 - protein, 117 aa, Artificial Sequence; identical to SEQ ID NO: 10994
  Description of Artificial Sequence: Synthetic polypeptide
  VH of XENP017916

SEQ ID NO: 16323 - protein, 5 aa, Artificial Sequence
  Description of Artificial Sequence: Synthetic peptide
  XENP017916 vhCDR1
SYGMS

SEQ ID NO: 16324 - protein, 17 aa, Artificial Sequence
  Description of Artificial Sequence: Synthetic peptide
  XENP017916 vhCDR2
TISGGGRYTYYPDSVKG

SEQ ID NO: 16325 - protein, 8 aa, Artificial Sequence
  Description of Artificial Sequence: Synthetic peptide
  XENP017916 vhCDR3
YYDSSFDY

SEQ ID NO: 16326 - protein, 214 aa, Artificial Sequence
  Description of Artificial Sequence: Synthetic polypeptide
  XENP017916 6A3_H1L3_IgG1_PVA_/S267K Light Chain
DIVMTQSPSSLSASVGDRVTITCRASQDVGTAVAWYQQKPGKSPKLLIYWASTRHTGVPDRFTGSGSGTDFTLTISSLQPEDFATYFCQHYSIYPWTFGGGTKVEIKRTVAAPSVFIFPPSDEQLKSGTASVVCLLNNFYPREAKVQWKVDNALQSGNSQESVTEQDSKDSTYSLSSTLTLSKADYEKHKVYACEVTHQGLSSPVTKSFNRGEC

SEQ ID NO: 16327 - protein, 107 aa, Artificial Sequence; identical to SEQ ID NO: 11013
  Description of Artificial Sequence: Synthetic polypeptide
  VL of XENP017916

SEQ ID NO: 16328 - protein, 11 aa, Artificial Sequence
  Description of Artificial Sequence: Synthetic peptide
  XENP017916 vlCDR1
RASQDVGTAVA

SEQ ID NO: 16329 - protein, 7 aa, Artificial Sequence
  Description of Artificial Sequence: Synthetic peptide
  XENP017916 vlCDR2
WASTRHT

SEQ ID NO: 16330 - protein, 9 aa, Artificial Sequence
  Description of Artificial Sequence: Synthetic peptide
  XENP017916 vlCDR3
QHYSIYPWT

SEQ ID NO: 16331 - protein, 446 aa, Artificial Sequence
  Description of Artificial Sequence: Synthetic polypeptide
  XENP017917 6A3_H2L3_IgG1_PVA_/S267K Heavy Chain
EVQLLESGGGLVQPGGSLRLSCAASGFTFSSYGMSWVRQAPGKGLEWVSTISGGGRYTYYPDSVKGRFTISRDNSKNTLYLQMNSLRAEDTAVYYCASYYDSSFDYWGQGTLVTVSSASTKGPSVFPLAPSSKSTSGGTAALGCLVKDYFPEPVTVSWNSGALTSGVHTFPAVLQSSGLYSLSSVVTVPSSSLGTQTYICNVNHKPSNTKVDKKVEPKSCDKTHTCPPCPAPPVAGPSVFLFPPKPKDTLMISRTPEVTCVVVDVKHEDPEVKFNWYVDGVEVHNAKTKPREEQYNSTYRVVSVLTVLHQDWLNGKEYKCKVSNKALPAPIEKTISKAKGQPREPQVYTLPPSREEMTKNQVSLTCLVKGFYPSDIAVEWESNGQPENNYKTTPPVLDSDGSFFLYSKLTVDKSRWQQGNVFSCSVMHEALHNHYTQKSLSLSPGK

SEQ ID NO: 16332 - protein, 117 aa, Artificial Sequence; identical to SEQ ID NO: 11030
  Description of Artificial Sequence: Synthetic polypeptide
  VH of XENP017917

SEQ ID NO: 16333 - protein, 5 aa, Artificial Sequence
  Description of Artificial Sequence: Synthetic peptide
  XENP017917 vhCDR1
SYGMS

SEQ ID NO: 16334 - protein, 17 aa, Artificial Sequence
  Description of Artificial Sequence: Synthetic peptide
  XENP017917 vhCDR2
TISGGGRYTYYPDSVKG

SEQ ID NO: 16335 - protein, 8 aa, Artificial Sequence
  Description of Artificial Sequence: Synthetic peptide
  XENP017917 vhCDR3
YYDSSFDY

SEQ ID NO: 16336 - protein, 214 aa, Artificial Sequence; identical to SEQ ID NO: 16326
  Description of Artificial Sequence: Synthetic polypeptide
  XENP017917 6A3_H2L3_IgG1_PVA_/S267K Light Chain

SEQ ID NO: 16337 - protein, 107 aa, Artificial Sequence; identical to SEQ ID NO: 11013
  Description of Artificial Sequence: Synthetic polypeptide
  VL of XENP017917

SEQ ID NO: 16338 - protein, 11 aa, Artificial Sequence
  Description of Artificial Sequence: Synthetic peptide
  XENP017917 vlCDR1
RASQDVGTAVA

SEQ ID NO: 16339 - protein, 7 aa, Artificial Sequence
  Description of Artificial Sequence: Synthetic peptide
  XENP017917 vlCDR2
WASTRHT

SEQ ID NO: 16340 - protein, 9 aa, Artificial Sequence
  Description of Artificial Sequence: Synthetic peptide
  XENP017917 vlCDR3
QHYSIYPWT

SEQ ID NO: 16341 - protein, 446 aa, Artificial Sequence
  Description of Artificial Sequence: Synthetic polypeptide
  XENP017918 6A3_H1.1_L3_IgG1_PVA_/S267K Heavy Chain
QVQLVESGGGLVKPGGSLRLSCAASGFTFSSYGMSWVRQAPGKRLEWVSTISGGGRYTYYPDSVKGRFTISRDNAKNSLYLQMNSLRAEDTAVYYCASYYDSSFDYWGQGTLVTVSSASTKGPSVFPLAPSSKSTSGGTAALGCLVKDYFPEPVTVSWNSGALTSGVHTFPAVLQSSGLYSLSSVVTVPSSSLGTQTYICNVNHKPSNTKVDKKVEPKSCDKTHTCPPCPAPPVAGPSVFLFPPKPKDTLMISRTPEVTCVVVDVKHEDPEVKFNWYVDGVEVHNAKTKPREEQYNSTYRVVSVLTVLHQDWLNGKEYKCKVSNKALPAPIEKTISKAKGQPREPQVYTLPPSREEMTKNQVSLTCLVKGFYPSDIAVEWESNGQPENNYKTTPPVLDSDGSFFLYSKLTVDKSRWQQGNVFSCSVMHEALHNHYTQKSLSLSPGK

SEQ ID NO: 16342 - protein, 117 aa, Artificial Sequence; identical to SEQ ID NO: 11021
  Description of Artificial Sequence: Synthetic polypeptide
  VH of XENP017918

SEQ ID NO: 16343 - protein, 5 aa, Artificial Sequence
  Description of Artificial Sequence: Synthetic peptide
  XENP017918 vhCDR1
SYGMS

SEQ ID NO: 16344 - protein, 17 aa, Artificial Sequence
  Description of Artificial Sequence: Synthetic peptide
  XENP017918 vhCDR2
TISGGGRYTYYPDSVKG

SEQ ID NO: 16345 - protein, 8 aa, Artificial Sequence
  Description of Artificial Sequence: Synthetic peptide
  XENP017918 vhCDR3
YYDSSFDY

SEQ ID NO: 16346 - protein, 214 aa, Artificial Sequence; identical to SEQ ID NO: 16326
  Description of Artificial Sequence: Synthetic polypeptide
  XENP017918 6A3_H1.1_L3_IgG1_PVA_/S267K Light Chain

SEQ ID NO: 16347 - protein, 107 aa, Artificial Sequence; identical to SEQ ID NO: 11013
  Description of Artificial Sequence: Synthetic polypeptide
  VL of XENP017918

SEQ ID NO: 16348 - protein, 11 aa, Artificial Sequence
  Description of Artificial Sequence: Synthetic peptide
  XENP017918 vlCDR1
RASQDVGTAVA

SEQ ID NO: 16349 - protein, 7 aa, Artificial Sequence
  Description of Artificial Sequence: Synthetic peptide
  XENP017918 vlCDR2
WASTRHT

SEQ ID NO: 16350 - protein, 9 aa, Artificial Sequence
  Description of Artificial Sequence: Synthetic peptide
  XENP017918 vlCDR3
QHYSIYPWT

SEQ ID NO: 16351 - protein, 451 aa, Artificial Sequence
  Description of Artificial Sequence: Synthetic polypeptide
  XENP018089 H1M7789N_H0L0_IgG1 Heavy Chain
EVQLLESGGGLVQPGGSLRLSCSASGFTFSSYTMNWVRQAPGKGLEWVSGISDTGGNTYYTDSVKGRFTVSRDNSKNTLSLQMNSLRAEDTAVYYCAKDQGGSYPYYFHYWGQGSLVTVSSASTKGPSVFPLAPSSKSTSGGTAALGCLVKDYFPEPVTVSWNSGALTSGVHTFPAVLQSSGLYSLSSVVTVPSSSLGTQTYICNVNHKPSNTKVDKKVEPKSCDKTHTCPPCPAPELLGGPSVFLFPPKPKDTLMISRTPEVTCVVVDVSHEDPEVKFNWYVDGVEVHNAKTKPREEQYNSTYRVVSVLTVLHQDWLNGKEYKCKVSNKALPAPIEKTISKAKGQPREPQVYTLPPSREEMTKNQVSLTCLVKGFYPSDIAVEWESNGQPENNYKTTPPVLDSDGSFFLYSKLTVDKSRWQQGNVFSCSVMHEALHNHYTQKSLSLSPGK

SEQ ID NO: 16352 - protein, 121 aa, Artificial Sequence
  Description of Artificial Sequence: Synthetic polypeptide
  VH of XENP018089
EVQLLESGGGLVQPGGSLRLSCSASGFTFSSYTMNWVRQAPGKGLEWVSGISDTGGNTYYTDSVKGRFTVSRDNSKNTLSLQMNSLRAEDTAVYYCAKDQGGSYPYYFHYWGQGSLVTVSS

SEQ ID NO: 16353 - protein, 5 aa, Artificial Sequence
  Description of Artificial Sequence: Synthetic peptide
  XENP018089 vhCDR1
SYTMN

SEQ ID NO: 16354 - protein, 17 aa, Artificial Sequence
  Description of Artificial Sequence: Synthetic peptide
  XENP018089 vhCDR2
GISDTGGNTYYTDSVKG

SEQ ID NO: 16355 - protein, 12 aa, Artificial Sequence
  Description of Artificial Sequence: Synthetic peptide
  XENP018089 vhCDR3
DQGGSYPYYFHY

SEQ ID NO: 16356 - protein, 215 aa, Artificial Sequence
  Description of Artificial Sequence: Synthetic polypeptide
  XENP018089 H1M7789N_H0L0_IgG1 Light Chain
DIQMTQSPSSLSASVGDRVTITCRASQSISSYLIWYQQKPGTAPKFLIYAASSLQSGVPSRFSGSGSGTDFTLTISSLQPEDFATYYCQQSYSTPPITFGQGTRLEIKRTVAAPSVFIFPPSDEQLKSGTASVVCLLNNFYPREAKVQWKVDNALQSGNSQESVTEQDSKDSTYSLSSTLTLSKADYEKHKVYACEVTHQGLSSPVTKSFNRGEC

SEQ ID NO: 16357 - protein, 108 aa, Artificial Sequence
  Description of Artificial Sequence: Synthetic polypeptide
  VL of XENP018089
DIQMTQSPSSLSASVGDRVTITCRASQSISSYLIWYQQKPGTAPKFLIYAASSLQSGVPSRFSGSGSGTDFTLTISSLQPEDFATYYCQQSYSTPPITFGQGTRLEIK

SEQ ID NO: 16358 - protein, 11 aa, Artificial Sequence
  Description of Artificial Sequence: Synthetic peptide
  XENP018089 vlCDR1
RASQSISSYLI

SEQ ID NO: 16359 - protein, 7 aa, Artificial Sequence
  Description of Artificial Sequence: Synthetic peptide
  XENP018089 vlCDR2
AASSLQS

SEQ ID NO: 16360 - protein, 10 aa, Artificial Sequence
  Description of Artificial Sequence: Synthetic peptide
  XENP018089 vlCDR3
QQSYSTPPIT

SEQ ID NO: 16361 - protein, 446 aa, Artificial Sequence
  Description of Artificial Sequence: Synthetic polypeptide
  XENP018090 H2aM7791N_H0L0_IgG1 Heavy Chain
QMQLQQWGAGLLKPSETLSLTCVVYGGSLNGYYWSWIRQSPGKGLEWIGEIDHSGSTNYNPSLKNRVTMSVDTSKIQFSLKLTSVTVADTAVYYCAREGLLPFDYWGQGTLVTVSSASTKGPSVFPLAPSSKSTSGGTAALGCLVKDYFPEPVTVSWNSGALTSGVHTFPAVLQSSGLYSLSSVVTVPSSSLGTQTYICNVNHKPSNTKVDKKVEPKSCDKTHTCPPCPAPELLGGPSVFLFPPKPKDTLMISRTPEVTCVVVDVSHEDPEVKFNWYVDGVEVHNAKTKPREEQYNSTYRVVSVLTVLHQDWLNGKEYKCKVSNKALPAPIEKTISKAKGQPREPQVYTLPPSREEMTKNQVSLTCLVKGFYPSDIAVEWESNGQPENNYKTTPPVLDSDGSFFLYSKLTVDKSRWQQGNVFSCSVMHEALHNHYTQKSLSLSPGK

SEQ ID NO: 16362 - protein, 116 aa, Artificial Sequence
  Description of Artificial Sequence: Synthetic polypeptide
  VH of XENP018090
QMQLQQWGAGLLKPSETLSLTCVVYGGSLNGYYWSWIRQSPGKGLEWIGEIDHSGSTNYNPSLKNRVTMSVDTSKIQFSLKLTSVTVADTAVYYCAREGLLPFDYWGQGTLVTVSS

SEQ ID NO: 16363 - protein, 5 aa, Artificial Sequence
  Description of Artificial Sequence: Synthetic peptide
  XENP018090 vhCDR1
GYYWS

SEQ ID NO: 16364 - protein, 16 aa, Artificial Sequence
  Description of Artificial Sequence: Synthetic peptide
  XENP018090 vhCDR2
EIDHSGSTNYNPSLKN

SEQ ID NO: 16365 - protein, 8 aa, Artificial Sequence
  Description of Artificial Sequence: Synthetic peptide
  XENP018090 vhCDR3
EGLLPFDY

SEQ ID NO: 16366 - protein, 215 aa, Artificial Sequence
  Description of Artificial Sequence: Synthetic polypeptide
  XENP018090 H2aM7791N_H0L0_IgG1 Light Chain
EIVLTQSPGTLSLSPGERVTLSCRASQSVYSNYLAWYQQNPGQAPRLLIYAASNRATGIPDRFSGSGSGTDFTLTISRLEPEDFAVYYCHQYATSPWTFGQGTKVEIKRTVAAPSVFIFPPSDEQLKSGTASVVCLLNNFYPREAKVQWKVDNALQSGNSQESVTEQDSKDSTYSLSSTLTLSKADYEKHKVYACEVTHQGLSSPVTKSFNRGEC

SEQ ID NO: 16367 - protein, 108 aa, Artificial Sequence
  Description of Artificial Sequence: Synthetic polypeptide
  VL of XENP018090
EIVLTQSPGTLSLSPGERVTLSCRASQSVYSNYLAWYQQNPGQAPRLLIYAASNRATGIPDRFSGSGSGTDFTLTISRLEPEDFAVYYCHQYATSPWTFGQGTKVEIK

SEQ ID NO: 16368 - protein, 12 aa, Artificial Sequence
  Description of Artificial Sequence: Synthetic peptide
  XENP018090 vlCDR1
RASQSVYSNYLA

SEQ ID NO: 16369 - protein, 7 aa, Artificial Sequence
  Description of Artificial Sequence: Synthetic peptide
  XENP018090 vlCDR2
AASNRAT

SEQ ID NO: 16370 - protein, 9 aa, Artificial Sequence
  Description of Artificial Sequence: Synthetic peptide
  XENP018090 vlCDR3
HQYATSPWT

SEQ ID NO: 16371 - protein, 446 aa, Artificial Sequence
  Description of Artificial Sequence: Synthetic polypeptide
  XENP018091 H2aM7796N_H0L0_IgG1 Heavy Chain
QVQLVESGGGVVQPGRSLRLSCAASGFTFSSYGMHWVRQAPGKGLEWVAIIWSDGDSEYNLDSVKGRFTISRDNSKNTLYLQMNSLRVEDSAVYYCARDRDLEDIWGQGTMVTVSSASTKGPSVFPLAPSSKSTSGGTAALGCLVKDYFPEPVTVSWNSGALTSGVHTFPAVLQSSGLYSLSSVVTVPSSSLGTQTYICNVNHKPSNTKVDKKVEPKSCDKTHTCPPCPAPELLGGPSVFLFPPKPKDTLMISRTPEVTCVVVDVSHEDPEVKFNWYVDGVEVHNAKTKPREEQYNSTYRVVSVLTVLHQDWLNGKEYKCKVSNKALPAPIEKTISKAKGQPREPQVYTLPPSREEMTKNQVSLTCLVKGFYPSDIAVEWESNGQPENNYKTTPPVLDSDGSFFLYSKLTVDKSRWQQGNVFSCSVMHEALHNHYTQKSLSLSPGK

SEQ ID NO: 16372 - protein, 116 aa, Artificial Sequence
  Description of Artificial Sequence: Synthetic polypeptide
  VH of XENP018091
QVQLVESGGGVVQPGRSLRLSCAASGFTFSSYGMHWVRQAPGKGLEWVAIIWSDGDSEYNLDSVKGRFTISRDNSKNTLYLQMNSLRVEDSAVYYCARDRDLEDIWGQGTMVTVSS

SEQ ID NO: 16373 - protein, 5 aa, Artificial Sequence
  Description of Artificial Sequence: Synthetic peptide
  XENP018091 vhCDR1
SYGMH

SEQ ID NO: 16374 - protein, 17 aa, Artificial Sequence
  Description of Artificial Sequence: Synthetic peptide
  XENP018091 vhCDR2
IIWSDGDSEYNLDSVKG

SEQ ID NO: 16375 - protein, 7 aa, Artificial Sequence
  Description of Artificial Sequence: Synthetic peptide
  XENP018091 vhCDR3
DRDLEDI

SEQ ID NO: 16376 - protein, 214 aa, Artificial Sequence
  Description of Artificial Sequence: Synthetic polypeptide
  XENP018091 H2aM7796N_H0L0_IgG1 Light Chain
DIQMTQSPSSLSASVGDRVTITCRASQGIRNDLGWYQQKPGKAPKRLIYAASNLQSGVPSRFSGSGSGTEFTLTISSLQPEDFATYYCLQHNSYPLTFGGGTKVEIKRTVAAPSVFIFPPSDEQLKSGTASVVCLLNNFYPREAKVQWKVDNALQSGNSQESVTEQDSKDSTYSLSSTLTLSKADYEKHKVYACEVTHQGLSSPVTKSFNRGEC

SEQ ID NO: 16377 - protein, 107 aa, Artificial Sequence
  Description of Artificial Sequence: Synthetic polypeptide
  VL of XENP018091
DIQMTQSPSSLSASVGDRVTITCRASQGIRNDLGWYQQKPGKAPKRLIYAASNLQSGVPSRFSGSGSGTEFTLTISSLQPEDFATYYCLQHNSYPLTFGGGTKVEIK

SEQ ID NO: 16378 - protein, 11 aa, Artificial Sequence
  Description of Artificial Sequence: Synthetic peptide
  XENP018091 vlCDR1
RASQGIRNDLG

SEQ ID NO: 16379 - protein, 7 aa, Artificial Sequence
  Description of Artificial Sequence: Synthetic peptide
  XENP018091 vlCDR2
AASNLQS

SEQ ID NO: 16380 - protein, 9 aa, Artificial Sequence
  Description of Artificial Sequence: Synthetic peptide
  XENP018091 vlCDR3
LQHNSYPLT

SEQ ID NO: 16381 - protein, 451 aa, Artificial Sequence
  Description of Artificial Sequence: Synthetic polypeptide
  XENP018092 H4H9057P2_H0L0_IgG1 Heavy Chain
EVQLVESGGGLVQSGRSLRLSCAASGFTFDDYAMHWVRQPPGKGLEWVSGINWNRGRTGYADSVKGRFTISRDNAKNSLYLQMNDLRVEDTALYYCAKAEQWLDEGYFDYWGQGTLVTVSSASTKGPSVFPLAPSSKSTSGGTAALGCLVKDYFPEPVTVSWNSGALTSGVHTFPAVLQSSGLYSLSSVVTVPSSSLGTQTYICNVNHKPSNTKVDKKVEPKSCDKTHTCPPCPAPELLGGPSVFLFPPKPKDTLMISRTPEVTCVVVDVSHEDPEVKFNWYVDGVEVHNAKTKPREEQYNSTYRVVSVLTVLHQDWLNGKEYKCKVSNKALPAPIEKTISKAKGQPREPQVYTLPPSREEMTKNQVSLTCLVKGFYPSDIAVEWESNGQPENNYKTTPPVLDSDGSFFLYSKLTVDKSRWQQGNVFSCSVMHEALHNHYTQKSLSLSPGK

SEQ ID NO: 16382 - protein, 121 aa, Artificial Sequence
  Description of Artificial Sequence: Synthetic polypeptide
  VH of XENP018092
EVQLVESGGGLVQSGRSLRLSCAASGFTFDDYAMHWVRQPPGKGLEWVSGINWNRGRTGYADSVKGRFTISRDNAKNSLYLQMNDLRVEDTALYYCAKAEQWLDEGYFDYWGQGTLVTVSS

SEQ ID NO: 16383 - protein, 5 aa, Artificial Sequence
  Description of Artificial Sequence: Synthetic peptide
  XENP018092 vhCDR1
DYAMH

SEQ ID NO: 16384 - protein, 17 aa, Artificial Sequence
  Description of Artificial Sequence: Synthetic peptide
  XENP018092 vhCDR2
GINWNRGRTGYADSVKG

SEQ ID NO: 16385 - protein, 12 aa, Artificial Sequence
  Description of Artificial Sequence: Synthetic peptide
  XENP018092 vhCDR3
AEQWLDEGYFDY

SEQ ID NO: 16386 - protein, 215 aa, Artificial Sequence
  Description of Artificial Sequence: Synthetic polypeptide
  XENP018092 H4H9057P2_H0L0_IgG1 Light Chain
DIQMTQSPSSLSASVGDRVTITCRASQSISSYLNWYQQKPGKAPKLLIYAASSLQSGVPSRFSGSGSGTDFTLTISSLQPEDFATYYCQQSYSTPPITFGQGTRLEIKRTVAAPSVFIFPPSDEQLKSGTASVVCLLNNFYPREAKVQWKVDNALQSGNSQESVTEQDSKDSTYSLSSTLTLSKADYEKHKVYACEVTHQGLSSPVTKSFNRGEC

SEQ ID NO: 16387 - protein, 108 aa, Artificial Sequence; identical to SEQ ID NO: 4405
  Description of Artificial Sequence: Synthetic polypeptide
  VL of XENP018092

SEQ ID NO: 16388 - protein, 11 aa, Artificial Sequence
  Description of Artificial Sequence: Synthetic peptide
  XENP018092 vlCDR1
RASQSISSYLN

SEQ ID NO: 16389 - protein, 7 aa, Artificial Sequence
  Description of Artificial Sequence: Synthetic peptide
  XENP018092 vlCDR2
AASSLQS

SEQ ID NO: 16390 - protein, 10 aa, Artificial Sequence
  Description of Artificial Sequence: Synthetic peptide
  XENP018092 vlCDR3
QQSYSTPPIT

SEQ ID NO: 16391 - protein, 451 aa, Artificial Sequence
  Description of Artificial Sequence: Synthetic polypeptide
  XENP018093 H4H9068P2_H0L0_IgG1 Heavy Chain
EVQLVESGGGLVQPGGSLRLSCAASGFSFSSYAMNWVRQAPGKGLEWVSTISDSGGSTYYADSVKGRFTISRDNSKNTLSLQMNSLRAEDTAVYYCAKDQGGSYPYYFHYWGQGTLVTVSSASTKGPSVFPLAPSSKSTSGGTAALGCLVKDYFPEPVTVSWNSGALTSGVHTFPAVLQSSGLYSLSSVVTVPSSSLGTQTYICNVNHKPSNTKVDKKVEPKSCDKTHTCPPCPAPELLGGPSVFLFPPKPKDTLMISRTPEVTCVVVDVSHEDPEVKFNWYVDGVEVHNAKTKPREEQYNSTYRVVSVLTVLHQDWLNGKEYKCKVSNKALPAPIEKTISKAKGQPREPQVYTLPPSREEMTKNQVSLTCLVKGFYPSDIAVEWESNGQPENNYKTTPPVLDSDGSFFLYSKLTVDKSRWQQGNVFSCSVMHEALHNHYTQKSLSLSPGK

SEQ ID NO: 16392 - protein, 121 aa, Artificial Sequence
  Description of Artificial Sequence: Synthetic polypeptide
  VH of XENP018093
EVQLVESGGGLVQPGGSLRLSCAASGFSFSSYAMNWVRQAPGKGLEWVSTISDSGGSTYYADSVKGRFTISRDNSKNTLSLQMNSLRAEDTAVYYCAKDQGGSYPYYFHYWGQGTLVTVSS

SEQ ID NO: 16393 - protein, 5 aa, Artificial Sequence
  Description of Artificial Sequence: Synthetic peptide
  XENP018093 vhCDR1
SYAMN

SEQ ID NO: 16394 - protein, 17 aa, Artificial Sequence
  Description of Artificial Sequence: Synthetic peptide
  XENP018093 vhCDR2
TISDSGGSTYYADSVKG

SEQ ID NO: 16395 - protein, 12 aa, Artificial Sequence
  Description of Artificial Sequence: Synthetic peptide
  XENP018093 vhCDR3
DQGGSYPYYFHY

SEQ ID NO: 16396 - protein, 215 aa, Artificial Sequence; identical to SEQ ID NO: 16386
  Description of Artificial Sequence: Synthetic polypeptide
  XENP018093 H4H9068P2_H0L0_IgG1 Light Chain

SEQ ID NO: 16397 - protein, 108 aa, Artificial Sequence; identical to SEQ ID NO: 4405
  Description of Artificial Sequence: Synthetic polypeptide
  VL of XENP018093

SEQ ID NO: 16398 - protein, 11 aa, Artificial Sequence
  Description of Artificial Sequence: Synthetic peptide
  XENP018093 vlCDR1
RASQSISSYLN

SEQ ID NO: 16399 - protein, 7 aa, Artificial Sequence
  Description of Artificial Sequence: Synthetic peptide
  XENP018093 vlCDR2
AASSLQS

SEQ ID NO: 16400 - protein, 10 aa, Artificial Sequence
  Description of Artificial Sequence: Synthetic peptide
  XENP018093 vlCDR3
QQSYSTPPIT

SEQ ID NO: 16401 - protein, 451 aa, Artificial Sequence
  Description of Artificial Sequence: Synthetic polypeptide
  XENP018094 1G6_H1.1_L1_IgG1_PVA_/S267K Heavy Chain
QVQLVESGGGLVKPGGSLRLSCAASGFTFSNYWMNWVRQAPGKGLEWVGEIRLKSNNYATHYAEPVKGRFTISRDDSKSTVYLQMNSLKTEDTAVYYCTRYYGNYGGYFDVWGAGTLVTVSSASTKGPSVFPLAPSSKSTSGGTAALGCLVKDYFPEPVTVSWNSGALTSGVHTFPAVLQSSGLYSLSSVVTVPSSSLGTQTYICNVNHKPSNTKVDKKVEPKSCDKTHTCPPCPAPPVAGPSVFLFPPKPKDTLMISRTPEVTCVVVDVKHEDPEVKFNWYVDGVEVHNAKTKPREEQYNSTYRVVSVLTVLHQDWLNGKEYKCKVSNKALPAPIEKTISKAKGQPREPQVYTLPPSREEMTKNQVSLTCLVKGFYPSDIAVEWESNGQPENNYKTTPPVLDSDGSFFLYSKLTVDKSRWQQGNVFSCSVMHEALHNHYTQKSLSLSPGK

SEQ ID NO: 16402 - protein, 122 aa, Artificial Sequence; identical to SEQ ID NO: 11039
  Description of Artificial Sequence: Synthetic polypeptide
  VH of XENP018094

SEQ ID NO: 16403 - protein, 5 aa, Artificial Sequence
  Description of Artificial Sequence: Synthetic peptide
  XENP018094 vhCDR1
NYWMN

SEQ ID NO: 16404 - protein, 19 aa, Artificial Sequence
  Description of Artificial Sequence: Synthetic peptide
  XENP018094 vhCDR2
EIRLKSNNYATHYAEPVKG

SEQ ID NO: 16405 - protein, 11 aa, Artificial Sequence
  Description of Artificial Sequence: Synthetic peptide
  XENP018094 vhCDR3
YYGNYGGYFDV

SEQ ID NO: 16406 - protein, 214 aa, Artificial Sequence; identical to SEQ ID NO: 16226
  Description of Artificial Sequence: Synthetic polypeptide
  XENP018094 1G6_H1.1_L1_IgG1_PVA_/S267K Light Chain

SEQ ID NO: 16407 - protein, 107 aa, Artificial Sequence; identical to SEQ ID NO: 10923
  Description of Artificial Sequence: Synthetic polypeptide
  VL of XENP018094

SEQ ID NO: 16408 - protein, 11 aa, Artificial Sequence
  Description of Artificial Sequence: Synthetic peptide
  XENP018094 vlCDR1
RASQSVSNDVA

SEQ ID NO: 16409 - protein, 7 aa, Artificial Sequence
  Description of Artificial Sequence: Synthetic peptide
  XENP018094 vlCDR2
YASHRYT

SEQ ID NO: 16410 - protein, 9 aa, Artificial Sequence
  Description of Artificial Sequence: Synthetic peptide
  XENP018094 vlCDR3
QQDYSSPRT

SEQ ID NO: 16411 - protein, 451 aa, Artificial Sequence
  Description of Artificial Sequence: Synthetic polypeptide
  XENP018095 1G6_H1.2_L1_IgG1_PVA_/S267K Heavy Chain
EVKLVESGGGLVKPGGSLRLSCAASGFTFSNYWMNWVRQAPGKGLEWVGEIRLKSNNYATHYAEPVKGRFTISRDDSKSTVYLQMNSLKTEDTAVYYCTRYYGNYGGYFDVWGAGTLVTVSSASTKGPSVFPLAPSSKSTSGGTAALGCLVKDYFPEPVTVSWNSGALTSGVHTFPAVLQSSGLYSLSSVVTVPSSSLGTQTYICNVNHKPSNTKVDKKVEPKSCDKTHTCPPCPAPPVAGPSVFLFPPKPKDTLMISRTPEVTCVVVDVKHEDPEVKFNWYVDGVEVHNAKTKPREEQYNSTYRVVSVLTVLHQDWLNGKEYKCKVSNKALPAPIEKTISKAKGQPREPQVYTLPPSREEMTKNQVSLTCLVKGFYPSDIAVEWESNGQPENNYKTTPPVLDSDGSFFLYSKLTVDKSRWQQGNVFSCSVMHEALHNHYTQKSLSLSPGK

SEQ ID NO: 16412 - protein, 122 aa, Artificial Sequence; identical to SEQ ID NO: 11048
  Description of Artificial Sequence: Synthetic polypeptide
  VH of XENP018095

SEQ ID NO: 16413 - protein, 5 aa, Artificial Sequence
  Description of Artificial Sequence: Synthetic peptide
  XENP018095 vhCDR1
NYWMN

SEQ ID NO: 16414 - protein, 19 aa, Artificial Sequence
  Description of Artificial Sequence: Synthetic peptide
  XENP018095 vhCDR2
EIRLKSNNYATHYAEPVKG

SEQ ID NO: 16415 - protein, 11 aa, Artificial Sequence
  Description of Artificial Sequence: Synthetic peptide
  XENP018095 vhCDR3
YYGNYGGYFDV

SEQ ID NO: 16416 - protein, 214 aa, Artificial Sequence; identical to SEQ ID NO: 16226
  Description of Artificial Sequence: Synthetic polypeptide
  XENP018095 1G6_H1.2_L1_IgG1_PVA_/S267K Light Chain

SEQ ID NO: 16417 - protein, 107 aa, Artificial Sequence; identical to SEQ ID NO: 10923
  Description of Artificial Sequence: Synthetic polypeptide
  VL of XENP018095

SEQ ID NO: 16418 - protein, 11 aa, Artificial Sequence
  Description of Artificial Sequence: Synthetic peptide
  XENP018095 vlCDR1
RASQSVSNDVA

SEQ ID NO: 16419 - protein, 7 aa, Artificial Sequence
  Description of Artificial Sequence: Synthetic peptide
  XENP018095 vlCDR2
YASHRYT

SEQ ID NO: 16420 - protein, 9 aa, Artificial Sequence
  Description of Artificial Sequence: Synthetic peptide
  XENP018095 vlCDR3
QQDYSSPRT

SEQ ID NO: 16421 - protein, 451 aa, Artificial Sequence
  Description of Artificial Sequence: Synthetic polypeptide
  XENP018096 1G6_H1.3_L1_IgG1_PVA_/S267K Heavy Chain
EVQLEESGGGLVKPGGSLRLSCAASGFTFSNYWMNWVRQAPGKGLEWVGEIRLKSNNYATHYAEPVKGRFTISRDDSKSTVYLQMNSLKTEDTAVYYCTRYYGNYGGYFDVWGAGTLVTVSSASTKGPSVFPLAPSSKSTSGGTAALGCLVKDYFPEPVTVSWNSGALTSGVHTFPAVLQSSGLYSLSSVVTVPSSSLGTQTYICNVNHKPSNTKVDKKVEPKSCDKTHTCPPCPAPPVAGPSVFLFPPKPKDTLMISRTPEVTCVVVDVKHEDPEVKFNWYVDGVEVHNAKTKPREEQYNSTYRVVSVLTVLHQDWLNGKEYKCKVSNKALPAPIEKTISKAKGQPREPQVYTLPPSREEMTKNQVSLTCLVKGFYPSDIAVEWESNGQPENNYKTTPPVLDSDGSFFLYSKLTVDKSRWQQGNVFSCSVMHEALHNHYTQKSLSLSPGK

SEQ ID NO: 16422 - protein, 122 aa, Artificial Sequence; identical to SEQ ID NO: 11057
  Description of Artificial Sequence: Synthetic polypeptide
  VH of XENP018096

SEQ ID NO: 16423 - protein, 5 aa, Artificial Sequence
  Description of Artificial Sequence: Synthetic peptide
  XENP018096 vhCDR1
NYWMN

SEQ ID NO: 16424 - protein, 19 aa, Artificial Sequence
  Description of Artificial Sequence: Synthetic peptide
  XENP018096 vhCDR2
EIRLKSNNYATHYAEPVKG

SEQ ID NO: 16425 - protein, 11 aa, Artificial Sequence
  Description of Artificial Sequence: Synthetic peptide
  XENP018096 vhCDR3
YYGNYGGYFDV

SEQ ID NO: 16426 - protein, 214 aa, Artificial Sequence; identical to SEQ ID NO: 16226
  Description of Artificial Sequence: Synthetic polypeptide
  XENP018096 1G6_H1.3_L1_IgG1_PVA_/S267K Light Chain

SEQ ID NO: 16427 - protein, 107 aa, Artificial Sequence; identical to SEQ ID NO: 10923
  Description of Artificial Sequence: Synthetic polypeptide
  VL of XENP018096

SEQ ID NO: 16428 - protein, 11 aa, Artificial Sequence
  Description of Artificial Sequence: Synthetic peptide
  XENP018096 vlCDR1
RASQSVSNDVA

SEQ ID NO: 16429 - protein, 7 aa, Artificial Sequence
  Description of Artificial Sequence: Synthetic peptide
  XENP018096 vlCDR2
YASHRYT

SEQ ID NO: 16430 - protein, 9 aa, Artificial Sequence
  Description of Artificial Sequence: Synthetic peptide
  XENP018096 vlCDR3
QQDYSSPRT

SEQ ID NO: 16431 - protein, 451 aa, Artificial Sequence
  Description of Artificial Sequence: Synthetic polypeptide
  XENP018101 1G6_H1.4_L1_IgG1_PVA_/S267K Heavy Chain
EVQLVESGGGLVQPGGSLRLSCAASGFTFSNYWMNWVRQAPGKGLEWVGEIRLKSNNYATHYAEPVKGRFTISRDDSKSTVYLQMNSLKTEDTAVYYCTRYYGNYGGYFDVWGAGTLVTVSSASTKGPSVFPLAPSSKSTSGGTAALGCLVKDYFPEPVTVSWNSGALTSGVHTFPAVLQSSGLYSLSSVVTVPSSSLGTQTYICNVNHKPSNTKVDKKVEPKSCDKTHTCPPCPAPPVAGPSVFLFPPKPKDTLMISRTPEVTCVVVDVKHEDPEVKFNWYVDGVEVHNAKTKPREEQYNSTYRVVSVLTVLHQDWLNGKEYKCKVSNKALPAPIEKTISKAKGQPREPQVYTLPPSREEMTKNQVSLTCLVKGFYPSDIAVEWESNGQPENNYKTTPPVLDSDGSFFLYSKLTVDKSRWQQGNVFSCSVMHEALHNHYTQKSLSLSPGK

SEQ ID NO: 16432 - protein, 122 aa, Artificial Sequence; identical to SEQ ID NO: 11066
  Description of Artificial Sequence: Synthetic polypeptide
  VH of XENP018101

SEQ ID NO: 16433 - protein, 5 aa, Artificial Sequence
  Description of Artificial Sequence: Synthetic peptide
  XENP018101 vhCDR1
NYWMN

SEQ ID NO: 16434 - protein, 19 aa, Artificial Sequence
  Description of Artificial Sequence: Synthetic peptide
  XENP018101 vhCDR2
EIRLKSNNYATHYAEPVKG

SEQ ID NO: 16435 - protein, 11 aa, Artificial Sequence
  Description of Artificial Sequence: Synthetic peptide
  XENP018101 vhCDR3
YYGNYGGYFDV

SEQ ID NO: 16436 - protein, 214 aa, Artificial Sequence; identical to SEQ ID NO: 16226
  Description of Artificial Sequence: Synthetic polypeptide
  XENP018101 1G6_H1.4_L1_IgG1_PVA_/S267K Light Chain

SEQ ID NO: 16437 - protein, 107 aa, Artificial Sequence; identical to SEQ ID NO: 10923
  Description of Artificial Sequence: Synthetic polypeptide
  VL of XENP018101

SEQ ID NO: 16438 - protein, 11 aa, Artificial Sequence
  Description of Artificial Sequence: Synthetic peptide
  XENP018101 vlCDR1
RASQSVSNDVA

SEQ ID NO: 16439 - protein, 7 aa, Artificial Sequence
  Description of Artificial Sequence: Synthetic peptide
  XENP018101 vlCDR2
YASHRYT

SEQ ID NO: 16440 - protein, 9 aa, Artificial Sequence
  Description of Artificial Sequence: Synthetic peptide
  XENP018101 vlCDR3
QQDYSSPRT

SEQ ID NO: 16441 - protein, 451 aa, Artificial Sequence
  Description of Artificial Sequence: Synthetic polypeptide
  XENP018102 1G6_H1.5_L1_IgG1_PVA_/S267K Heavy Chain
EVQLVESGGGLVRPGGSLRLSCAASGFTFSNYWMNWVRQAPGKGLEWVGEIRLKSNNYATHYAEPVKGRFTISRDDSKSTVYLQMNSLKTEDTAVYYCTRYYGNYGGYFDVWGAGTLVTVSSASTKGPSVFPLAPSSKSTSGGTAALGCLVKDYFPEPVTVSWNSGALTSGVHTFPAVLQSSGLYSLSSVVTVPSSSLGTQTYICNVNHKPSNTKVDKKVEPKSCDKTHTCPPCPAPPVAGPSVFLFPPKPKDTLMISRTPEVTCVVVDVKHEDPEVKFNWYVDGVEVHNAKTKPREEQYNSTYRVVSVLTVLHQDWLNGKEYKCKVSNKALPAPIEKTISKAKGQPREPQVYTLPPSREEMTKNQVSLTCLVKGFYPSDIAVEWESNGQPENNYKTTPPVLDSDGSFFLYSKLTVDKSRWQQGNVFSCSVMHEALHNHYTQKSLSLSPGK

SEQ ID NO: 16442 - protein, 122 aa, Artificial Sequence; identical to SEQ ID NO: 11075
  Description of Artificial Sequence: Synthetic polypeptide
  VH of XENP018102

SEQ ID NO: 16443 - protein, 5 aa, Artificial Sequence
  Description of Artificial Sequence: Synthetic peptide
  XENP018102 vhCDR1
NYWMN

SEQ ID NO: 16444 - protein, 19 aa, Artificial Sequence
  Description of Artificial Sequence: Synthetic peptide
  XENP018102 vhCDR2
EIRLKSNNYATHYAEPVKG

SEQ ID NO: 16445 - protein, 11 aa, Artificial Sequence
  Description of Artificial Sequence: Synthetic peptide
  XENP018102 vhCDR3
YYGNYGGYFDV

SEQ ID NO: 16446 - protein, 214 aa, Artificial Sequence; identical to SEQ ID NO: 16226
  Description of Artificial Sequence: Synthetic polypeptide
  XENP018102 1G6_H1.5_L1_IgG1_PVA_/S267K Light Chain

SEQ ID NO: 16447 - protein, 107 aa, Artificial Sequence; identical to SEQ ID NO: 10923
  Description of Artificial Sequence: Synthetic polypeptide
  VL of XENP018102

SEQ ID NO: 16448 - protein, 11 aa, Artificial Sequence
  Description of Artificial Sequence: Synthetic peptide
  XENP018102 vlCDR1
RASQSVSNDVA

SEQ ID NO: 16449 - protein, 7 aa, Artificial Sequence
  Description of Artificial Sequence: Synthetic peptide
  XENP018102 vlCDR2
YASHRYT

SEQ ID NO: 16450 - protein, 9 aa, Artificial Sequence
  Description of Artificial Sequence: Synthetic peptide
  XENP018102 vlCDR3
QQDYSSPRT

SEQ ID NO: 16451 - protein, 451 aa, Artificial Sequence
  Description of Artificial Sequence: Synthetic polypeptide
  XENP018103 1G6_H1.6_L1_IgG1_PVA_/S267K Heavy Chain
EVQLVESGGGLVKPGGSMRLSCAASGFTFSNYWMNWVRQAPGKGLEWVGEIRLKSNNYATHYAEPVKGRFTISRDDSKSTVYLQMNSLKTEDTAVYYCTRYYGNYGGYFDVWGAGTLVTVSSASTKGPSVFPLAPSSKSTSGGTAALGCLVKDYFPEPVTVSWNSGALTSGVHTFPAVLQSSGLYSLSSVVTVPSSSLGTQTYICNVNHKPSNTKVDKKVEPKSCDKTHTCPPCPAPPVAGPSVFLFPPKPKDTLMISRTPEVTCVVVDVKHEDPEVKFNWYVDGVEVHNAKTKPREEQYNSTYRVVSVLTVLHQDWLNGKEYKCKVSNKALPAPIEKTISKAKGQPREPQVYTLPPSREEMTKNQVSLTCLVKGFYPSDIAVEWESNGQPENNYKTTPPVLDSDGSFFLYSKLTVDKSRWQQGNVFSCSVMHEALHNHYTQKSLSLSPGK

SEQ ID NO: 16452 - protein, 122 aa, Artificial Sequence; identical to SEQ ID NO: 11084
  Description of Artificial Sequence: Synthetic polypeptide
  VH of XENP018103

SEQ ID NO: 16453 - protein, 5 aa, Artificial Sequence
  Description of Artificial Sequence: Synthetic peptide
  XENP018103 vhCDR1
NYWMN

SEQ ID NO: 16454 - protein, 19 aa, Artificial Sequence
  Description of Artificial Sequence: Synthetic peptide
  XENP018103 vhCDR2
EIRLKSNNYATHYAEPVKG

SEQ ID NO: 16455 - protein, 11 aa, Artificial Sequence
  Description of Artificial Sequence: Synthetic peptide
  XENP018103 vhCDR3
YYGNYGGYFDV

SEQ ID NO: 16456 - protein, 214 aa, Artificial Sequence; identical to SEQ ID NO: 16226
  Description of Artificial Sequence: Synthetic polypeptide
  XENP018103 1G6_H1.6_L1_IgG1_PVA_/S267K Light Chain

SEQ ID NO: 16457 - protein, 107 aa, Artificial Sequence; identical to SEQ ID NO: 10923
  Description of Artificial Sequence: Synthetic polypeptide
  VL of XENP018103

SEQ ID NO: 16458 - protein, 11 aa, Artificial Sequence
  Description of Artificial Sequence: Synthetic peptide
  XENP018103 vlCDR1
RASQSVSNDVA

SEQ ID NO: 16459 - protein, 7 aa, Artificial Sequence
  Description of Artificial Sequence: Synthetic peptide
  XENP018103 vlCDR2
YASHRYT

SEQ ID NO: 16460 - protein, 9 aa, Artificial Sequence
  Description of Artificial Sequence: Synthetic peptide
  XENP018103 vlCDR3
QQDYSSPRT

SEQ ID NO: 16461 - protein, 451 aa, Artificial Sequence
  Description of Artificial Sequence: Synthetic polypeptide
  XENP018104 1G6_H1.7_L1_IgG1_PVA_/S267K Heavy Chain
EVQLVESGGGLVKPGGSLKLSCAASGFTFSNYWMNWVRQAPGKGLEWVGEIRLKSNNYATHYAEPVKGRFTISRDDSKSTVYLQMNSLKTEDTAVYYCTRYYGNYGGYFDVWGAGTLVTVSSASTKGPSVFPLAPSSKSTSGGTAALGCLVKDYFPEPVTVSWNSGALTSGVHTFPAVLQSSGLYSLSSVVTVPSSSLGTQTYICNVNHKPSNTKVDKKVEPKSCDKTHTCPPCPAPPVAGPSVFLFPPKPKDTLMISRTPEVTCVVVDVKHEDPEVKFNWYVDGVEVHNAKTKPREEQYNSTYRVVSVLTVLHQDWLNGKEYKCKVSNKALPAPIEKTISKAKGQPREPQVYTLPPSREEMTKNQVSLTCLVKGFYPSDIAVEWESNGQPENNYKTTPPVLDSDGSFFLYSKLTVDKSRWQQGNVFSCSVMHEALHNHYTQKSLSLSPGK

SEQ ID NO: 16462 - protein, 122 aa, Artificial Sequence; identical to SEQ ID NO: 11093
  Description of Artificial Sequence: Synthetic polypeptide
  VH of XENP018104

SEQ ID NO: 16463 - protein, 5 aa, Artificial Sequence
  Description of Artificial Sequence: Synthetic peptide
  XENP018104 vhCDR1
NYWMN

SEQ ID NO: 16464 - protein, 19 aa, Artificial Sequence
  Description of Artificial Sequence: Synthetic peptide
  XENP018104 vhCDR2
EIRLKSNNYATHYAEPVKG

SEQ ID NO: 16465 - protein, 11 aa, Artificial Sequence
  Description of Artificial Sequence: Synthetic peptide
  XENP018104 vhCDR3
YYGNYGGYFDV

SEQ ID NO: 16466 - protein, 214 aa, Artificial Sequence; identical to SEQ ID NO: 16226
  Description of Artificial Sequence: Synthetic polypeptide
  XENP018104 1G6_H1.7_L1_IgG1_PVA_/S267K Light Chain

SEQ ID NO: 16467 - protein, 107 aa, Artificial Sequence; identical to SEQ ID NO: 10923
  Description of Artificial Sequence: Synthetic polypeptide
  VL of XENP018104

SEQ ID NO: 16468 - protein, 11 aa, Artificial Sequence
  Description of Artificial Sequence: Synthetic peptide
  XENP018104 vlCDR1
RASQSVSNDVA

SEQ ID NO: 16469 - protein, 7 aa, Artificial Sequence
  Description of Artificial Sequence: Synthetic peptide
  XENP018104 vlCDR2
YASHRYT

SEQ ID NO: 16470 - protein, 9 aa, Artificial Sequence
  Description of Artificial Sequence: Synthetic peptide
  XENP018104 vlCDR3
QQDYSSPRT

SEQ ID NO: 16471 - protein, 451 aa, Artificial Sequence
  Description of Artificial Sequence: Synthetic polypeptide
  XENP018105 1G6_H1.8_L1_IgG1_PVA_/S267K Heavy Chain
EVQLVESGGGLVKPGGSLRLSCVASGFTFSNYWMNWVRQAPGKGLEWVGEIRLKSNNYATHYAEPVKGRFTISRDDSKSTVYLQMNSLKTEDTAVYYCTRYYGNYGGYFDVWGAGTLVTVSSASTKGPSVFPLAPSSKSTSGGTAALGCLVKDYFPEPVTVSWNSGALTSGVHTFPAVLQSSGLYSLSSVVTVPSSSLGTQTYICNVNHKPSNTKVDKKVEPKSCDKTHTCPPCPAPPVAGPSVFLFPPKPKDTLMISRTPEVTCVVVDVKHEDPEVKFNWYVDGVEVHNAKTKPREEQYNSTYRVVSVLTVLHQDWLNGKEYKCKVSNKALPAPIEKTISKAKGQPREPQVYTLPPSREEMTKNQVSLTCLVKGFYPSDIAVEWESNGQPENNYKTTPPVLDSDGSFFLYSKLTVDKSRWQQGNVFSCSVMHEALHNHYTQKSLSLSPGK

SEQ ID NO: 16472 - protein, 122 aa, Artificial Sequence; identical to SEQ ID NO: 11102
  Description of Artificial Sequence: Synthetic polypeptide
  VH of XENP018105

SEQ ID NO: 16473 - protein, 5 aa, Artificial Sequence
  Description of Artificial Sequence: Synthetic peptide
  XENP018105 vhCDR1
NYWMN

SEQ ID NO: 16474 - protein, 19 aa, Artificial Sequence
  Description of Artificial Sequence: Synthetic peptide
  XENP018105 vhCDR2
EIRLKSNNYATHYAEPVKG

SEQ ID NO: 16475 - protein, 11 aa, Artificial Sequence
  Description of Artificial Sequence: Synthetic peptide
  XENP018105 vhCDR3
YYGNYGGYFDV

SEQ ID NO: 16476 - protein, 214 aa, Artificial Sequence; identical to SEQ ID NO: 16226
  Description of Artificial Sequence: Synthetic polypeptide
  XENP018105 1G6_H1.8_L1_IgG1_PVA_/S267K Light Chain

SEQ ID NO: 16477 - protein, 107 aa, Artificial Sequence; identical to SEQ ID NO: 10923
  Description of Artificial Sequence: Synthetic polypeptide
  VL of XENP018105

SEQ ID NO: 16478 - protein, 11 aa, Artificial Sequence
  Description of Artificial Sequence: Synthetic peptide
  XENP018105 vlCDR1
RASQSVSNDVA

SEQ ID NO: 16479 - protein, 7 aa, Artificial Sequence
  Description of Artificial Sequence: Synthetic peptide
  XENP018105 vlCDR2
YASHRYT

SEQ ID NO: 16480 - protein, 9 aa, Artificial Sequence
  Description of Artificial Sequence: Synthetic peptide
  XENP018105 vlCDR3
QQDYSSPRT

SEQ ID NO: 16481 - protein, 451 aa, Artificial Sequence
  Description of Artificial Sequence: Synthetic polypeptide
  XENP018106 1G6_H1.9_L1_IgG1_PVA_/S267K Heavy Chain
EVQLVESGGGLVKPGGSLRLSCAASGFTVSNYWMNWVRQAPGKGLEWVGEIRLKSNNYATHYAEPVKGRFTISRDDSKSTVYLQMNSLKTEDTAVYYCTRYYGNYGGYFDVWGAGTLVTVSSASTKGPSVFPLAPSSKSTSGGTAALGCLVKDYFPEPVTVSWNSGALTSGVHTFPAVLQSSGLYSLSSVVTVPSSSLGTQTYICNVNHKPSNTKVDKKVEPKSCDKTHTCPPCPAPPVAGPSVFLFPPKPKDTLMISRTPEVTCVVVDVKHEDPEVKFNWYVDGVEVHNAKTKPREEQYNSTYRVVSVLTVLHQDWLNGKEYKCKVSNKALPAPIEKTISKAKGQPREPQVYTLPPSREEMTKNQVSLTCLVKGFYPSDIAVEWESNGQPENNYKTTPPVLDSDGSFFLYSKLTVDKSRWQQGNVFSCSVMHEALHNHYTQKSLSLSPGK

SEQ ID NO: 16482 - protein, 122 aa, Artificial Sequence; identical to SEQ ID NO: 11111
  Description of Artificial Sequence: Synthetic polypeptide
  VH of XENP018106

SEQ ID NO: 16483 - protein, 5 aa, Artificial Sequence
  Description of Artificial Sequence: Synthetic peptide
  XENP018106 vhCDR1
NYWMN

SEQ ID NO: 16484 - protein, 19 aa, Artificial Sequence
  Description of Artificial Sequence: Synthetic peptide
  XENP018106 vhCDR2
EIRLKSNNYATHYAEPVKG

SEQ ID NO: 16485 - protein, 11 aa, Artificial Sequence
  Description of Artificial Sequence: Synthetic peptide
  XENP018106 vhCDR3
YYGNYGGYFDV

SEQ ID NO: 16486 - protein, 214 aa, Artificial Sequence; identical to SEQ ID NO: 16226
  Description of Artificial Sequence: Synthetic polypeptide
  XENP018106 1G6_H1.9_L1_IgG1_PVA_/S267K Light Chain

SEQ ID NO: 16487 - protein, 107 aa, Artificial Sequence; identical to SEQ ID NO: 10923
  Description of Artificial Sequence: Synthetic polypeptide
  VL of XENP018106

SEQ ID NO: 16488 - protein, 11 aa, Artificial Sequence
  Description of Artificial Sequence: Synthetic peptide
  XENP018106 vlCDR1
RASQSVSNDVA

SEQ ID NO: 16489 - protein, 7 aa, Artificial Sequence
  Description of Artificial Sequence: Synthetic peptide
  XENP018106 vlCDR2
YASHRYT

SEQ ID NO: 16490 - protein, 9 aa, Artificial Sequence
  Description of Artificial Sequence: Synthetic peptide
  XENP018106 vlCDR3
QQDYSSPRT

SEQ ID NO: 16491 - protein, 451 aa, Artificial Sequence
  Description of Artificial Sequence: Synthetic polypeptide
  XENP018107 1G6_H1.10_L1_IgG1_PVA_/S267K Heavy Chain
EVQLVESGGGLVKPGGSLRLSCAASGFTFTNYWMNWVRQAPGKGLEWVGEIRLKSNNYATHYAEPVKGRFTISRDDSKSTVYLQMNSLKTEDTAVYYCTRYYGNYGGYFDVWGAGTLVTVSSASTKGPSVFPLAPSSKSTSGGTAALGCLVKDYFPEPVTVSWNSGALTSGVHTFPAVLQSSGLYSLSSVVTVPSSSLGTQTYICNVNHKPSNTKVDKKVEPKSCDKTHTCPPCPAPPVAGPSVFLFPPKPKDTLMISRTPEVTCVVVDVKHEDPEVKFNWYVDGVEVHNAKTKPREEQYNSTYRVVSVLTVLHQDWLNGKEYKCKVSNKALPAPIEKTISKAKGQPREPQVYTLPPSREEMTKNQVSLTCLVKGFYPSDIAVEWESNGQPENNYKTTPPVLDSDGSFFLYSKLTVDKSRWQQGNVFSCSVMHEALHNHYTQKSLSLSPGK

SEQ ID NO: 16492 - protein, 122 aa, Artificial Sequence; identical to SEQ ID NO: 11120
  Description of Artificial Sequence: Synthetic polypeptide
  VH of XENP018107

SEQ ID NO: 16493 - protein, 5 aa, Artificial Sequence
  Description of Artificial Sequence: Synthetic peptide
  XENP018107 vhCDR1
NYWMN

SEQ ID NO: 16494 - protein, 19 aa, Artificial Sequence
  Description of Artificial Sequence: Synthetic peptide
  XENP018107 vhCDR2
EIRLKSNNYATHYAEPVKG

SEQ ID NO: 16495 - protein, 11 aa, Artificial Sequence
  Description of Artificial Sequence: Synthetic peptide
  XENP018107 vhCDR3
YYGNYGGYFDV

SEQ ID NO: 16496 - protein, 214 aa, Artificial Sequence; identical to SEQ ID NO: 16226
  Description of Artificial Sequence: Synthetic polypeptide
  XENP018107 1G6_H1.10_L1_IgG1_PVA_/S267K Light Chain

SEQ ID NO: 16497 - protein, 107 aa, Artificial Sequence; identical to SEQ ID NO: 10923
  Description of Artificial Sequence: Synthetic polypeptide
  VL of XENP018107

SEQ ID NO: 16498 - protein, 11 aa, Artificial Sequence
  Description of Artificial Sequence: Synthetic peptide
  XENP018107 vlCDR1
RASQSVSNDVA

SEQ ID NO: 16499 - protein, 7 aa, Artificial Sequence
  Description of Artificial Sequence: Synthetic peptide
  XENP018107 vlCDR2
YASHRYT

SEQ ID NO: 16500 - protein, 9 aa, Artificial Sequence
  Description of Artificial Sequence: Synthetic peptide
  XENP018107 vlCDR3
QQDYSSPRT

SEQ ID NO: 16501 - protein, 451 aa, Artificial Sequence
  Description of Artificial Sequence: Synthetic polypeptide
  XENP018108 1G6_H1.11_L1_IgG1_PVA_/S267K Heavy Chain
EVQLVESGGGLVKPGGSLRLSCAASGFTFANYWMNWVRQAPGKGLEWVGEIRLKSNNYATHYAEPVKGRFTISRDDSKSTVYLQMNSLKTEDTAVYYCTRYYGNYGGYFDVWGAGTLVTVSSASTKGPSVFPLAPSSKSTSGGTAALGCLVKDYFPEPVTVSWNSGALTSGVHTFPAVLQSSGLYSLSSVVTVPSSSLGTQTYICNVNHKPSNTKVDKKVEPKSCDKTHTCPPCPAPPVAGPSVFLFPPKPKDTLMISRTPEVTCVVVDVKHEDPEVKFNWYVDGVEVHNAKTKPREEQYNSTYRVVSVLTVLHQDWLNGKEYKCKVSNKALPAPIEKTISKAKGQPREPQVYTLPPSREEMTKNQVSLTCLVKGFYPSDIAVEWESNGQPENNYKTTPPVLDSDGSFFLYSKLTVDKSRWQQGNVFSCSVMHEALHNHYTQKSLSLSPGK

SEQ ID NO: 16502 - protein, 122 aa, Artificial Sequence; identical to SEQ ID NO: 11129
  Description of Artificial Sequence: Synthetic polypeptide
  VH of XENP018108

SEQ ID NO: 16503 - protein, 5 aa, Artificial Sequence
  Description of Artificial Sequence: Synthetic peptide
  XENP018108 vhCDR1
NYWMN

SEQ ID NO: 16504 - protein, 19 aa, Artificial Sequence
  Description of Artificial Sequence: Synthetic peptide
  XENP018108 vhCDR2
EIRLKSNNYATHYAEPVKG

SEQ ID NO: 16505 - protein, 11 aa, Artificial Sequence
  Description of Artificial Sequence: Synthetic peptide
  XENP018108 vhCDR3
YYGNYGGYFDV

SEQ ID NO: 16506 - protein, 214 aa, Artificial Sequence; identical to SEQ ID NO: 16226
  Description of Artificial Sequence: Synthetic polypeptide
  XENP018108 1G6_H1.11_L1_IgG1_PVA_/S267K Light Chain

SEQ ID NO: 16507 - protein, 107 aa, Artificial Sequence; identical to SEQ ID NO: 10923
  Description of Artificial Sequence: Synthetic polypeptide
  VL of XENP018108

SEQ ID NO: 16508 - protein, 11 aa, Artificial Sequence
  Description of Artificial Sequence: Synthetic peptide
  XENP018108 vlCDR1
RASQSVSNDVA

SEQ ID NO: 16509 - protein, 7 aa, Artificial Sequence
  Description of Artificial Sequence: Synthetic peptide
  XENP018108 vlCDR2
YASHRYT

SEQ ID NO: 16510 - protein, 9 aa, Artificial Sequence
  Description of Artificial Sequence: Synthetic peptide
  XENP018108 vlCDR3
QQDYSSPRT

SEQ ID NO: 16511 - protein, 451 aa, Artificial Sequence
  Description of Artificial Sequence: Synthetic polypeptide
  XENP018109 1G6_H1.12_L1_IgG1_PVA_/S267K Heavy Chain
EVQLVESGGGLVKPGGSLRLSCAASGFTFQNYWMNWVRQAPGKGLEWVGEIRLKSNNYATHYAEPVKGRFTISRDDSKSTVYLQMNSLKTEDTAVYYCTRYYGNYGGYFDVWGAGTLVTVSSASTKGPSVFPLAPSSKSTSGGTAALGCLVKDYFPEPVTVSWNSGALTSGVHTFPAVLQSSGLYSLSSVVTVPSSSLGTQTYICNVNHKPSNTKVDKKVEPKSCDKTHTCPPCPAPPVAGPSVFLFPPKPKDTLMISRTPEVTCVVVDVKHEDPEVKFNWYVDGVEVHNAKTKPREEQYNSTYRVVSVLTVLHQDWLNGKEYKCKVSNKALPAPIEKTISKAKGQPREPQVYTLPPSREEMTKNQVSLTCLVKGFYPSDIAVEWESNGQPENNYKTTPPVLDSDGSFFLYSKLTVDKSRWQQGNVFSCSVMHEALHNHYTQKSLSLSPGK

SEQ ID NO: 16512 - protein, 122 aa, Artificial Sequence; identical to SEQ ID NO: 11138
  Description of Artificial Sequence: Synthetic polypeptide
  VH of XENP018109

SEQ ID NO: 16513 - protein, 5 aa, Artificial Sequence
  Description of Artificial Sequence: Synthetic peptide
  XENP018109 vhCDR1
NYWMN

SEQ ID NO: 16514 - protein, 19 aa, Artificial Sequence
  Description of Artificial Sequence: Synthetic peptide
  XENP018109 vhCDR2
EIRLKSNNYATHYAEPVKG

SEQ ID NO: 16515 - protein, 11 aa, Artificial Sequence
  Description of Artificial Sequence: Synthetic peptide
  XENP018109 vhCDR3
YYGNYGGYFDV

SEQ ID NO: 16516 - protein, 214 aa, Artificial Sequence; identical to SEQ ID NO: 16226
  Description of Artificial Sequence: Synthetic polypeptide
  XENP018109 1G6_H1.12_L1_IgG1_PVA_/S267K Light Chain

SEQ ID NO: 16517 - protein, 107 aa, Artificial Sequence; identical to SEQ ID NO: 10923
  Description of Artificial Sequence: Synthetic polypeptide
  VL of XENP018109

SEQ ID NO: 16518 - protein, 11 aa, Artificial Sequence
  Description of Artificial Sequence: Synthetic peptide
  XENP018109 vlCDR1
RASQSVSNDVA

SEQ ID NO: 16519 - protein, 7 aa, Artificial Sequence
  Description of Artificial Sequence: Synthetic peptide
  XENP018109 vlCDR2
YASHRYT

SEQ ID NO: 16520 - protein, 9 aa, Artificial Sequence
  Description of Artificial Sequence: Synthetic peptide
  XENP018109 vlCDR3
QQDYSSPRT

SEQ ID NO: 16521 - protein, 451 aa, Artificial Sequence
  Description of Artificial Sequence: Synthetic polypeptide
  XENP018110 1G6_H1.13_L1_IgG1_PVA_/S267K Heavy Chain
EVQLVESGGGLVKPGGSLRLSCAASGFTFGNYWMNWVRQAPGKGLEWVGEIRLKSNNYATHYAEPVKGRFTISRDDSKSTVYLQMNSLKTEDTAVYYCTRYYGNYGGYFDVWGAGTLVTVSSASTKGPSVFPLAPSSKSTSGGTAALGCLVKDYFPEPVTVSWNSGALTSGVHTFPAVLQSSGLYSLSSVVTVPSSSLGTQTYICNVNHKPSNTKVDKKVEPKSCDKTHTCPPCPAPPVAGPSVFLFPPKPKDTLMISRTPEVTCVVVDVKHEDPEVKFNWYVDGVEVHNAKTKPREEQYNSTYRVVSVLTVLHQDWLNGKEYKCKVSNKALPAPIEKTISKAKGQPREPQVYTLPPSREEMTKNQVSLTCLVKGFYPSDIAVEWESNGQPENNYKTTPPVLDSDGSFFLYSKLTVDKSRWQQGNVFSCSVMHEALHNHYTQKSLSLSPGK

SEQ ID NO: 16522 - protein, 122 aa, Artificial Sequence; identical to SEQ ID NO: 11147
  Description of Artificial Sequence: Synthetic polypeptide
  VH of XENP018110

SEQ ID NO: 16523 - protein, 5 aa, Artificial Sequence
  Description of Artificial Sequence: Synthetic peptide
  XENP018110 vhCDR1
NYWMN

SEQ ID NO: 16524 - protein, 19 aa, Artificial Sequence
  Description of Artificial Sequence: Synthetic peptide
  XENP018110 vhCDR2
EIRLKSNNYATHYAEPVKG

SEQ ID NO: 16525 - protein, 11 aa, Artificial Sequence
  Description of Artificial Sequence: Synthetic peptide
  XENP018110 vhCDR3
YYGNYGGYFDV

SEQ ID NO: 16526 - protein, 214 aa, Artificial Sequence; identical to SEQ ID NO: 16226
  Description of Artificial Sequence: Synthetic polypeptide
  XENP018110 1G6_H1.13_L1_IgG1_PVA_/S267K Light Chain

SEQ ID NO: 16527 - protein, 107 aa, Artificial Sequence; identical to SEQ ID NO: 10923
  Description of Artificial Sequence: Synthetic polypeptide
  VL of XENP018110

SEQ ID NO: 16528 - protein, 11 aa, Artificial Sequence
  Description of Artificial Sequence: Synthetic peptide
  XENP018110 vlCDR1
RASQSVSNDVA

SEQ ID NO: 16529 - protein, 7 aa, Artificial Sequence
  Description of Artificial Sequence: Synthetic peptide
  XENP018110 vlCDR2
YASHRYT

SEQ ID NO: 16530 - protein, 9 aa, Artificial Sequence
  Description of Artificial Sequence: Synthetic peptide
  XENP018110 vlCDR3
QQDYSSPRT

SEQ ID NO: 16531 - protein, 451 aa, Artificial Sequence
  Description of Artificial Sequence: Synthetic polypeptide
  XENP018111 1G6_H1.14_L1_IgG1_PVA_/S267K Heavy Chain
EVQLVESGGGLVKPGGSLRLSCAASGFTFVNYWMNWVRQAPGKGLEWVGEIRLKSNNYATHYAEPVKGRFTISRDDSKSTVYLQMNSLKTEDTAVYYCTRYYGNYGGYFDVWGAGTLVTVSSASTKGPSVFPLAPSSKSTSGGTAALGCLVKDYFPEPVTVSWNSGALTSGVHTFPAVLQSSGLYSLSSVVTVPSSSLGTQTYICNVNHKPSNTKVDKKVEPKSCDKTHTCPPCPAPPVAGPSVFLFPPKPKDTLMISRTPEVTCVVVDVKHEDPEVKFNWYVDGVEVHNAKTKPREEQYNSTYRVVSVLTVLHQDWLNGKEYKCKVSNKALPAPIEKTISKAKGQPREPQVYTLPPSREEMTKNQVSLTCLVKGFYPSDIAVEWESNGQPENNYKTTPPVLDSDGSFFLYSKLTVDKSRWQQGNVFSCSVMHEALHNHYTQKSLSLSPGK

SEQ ID NO: 16532 - protein, 122 aa, Artificial Sequence; identical to SEQ ID NO: 11156
  Description of Artificial Sequence: Synthetic polypeptide
  VH of XENP018111

SEQ ID NO: 16533 - protein, 5 aa, Artificial Sequence
  Description of Artificial Sequence: Synthetic peptide
  XENP018111 vhCDR1
NYWMN

SEQ ID NO: 16534 - protein, 19 aa, Artificial Sequence
  Description of Artificial Sequence: Synthetic peptide
  XENP018111 vhCDR2
EIRLKSNNYATHYAEPVKG

SEQ ID NO: 16535 - protein, 11 aa, Artificial Sequence
  Description of Artificial Sequence: Synthetic peptide
  XENP018111 vhCDR3
YYGNYGGYFDV

SEQ ID NO: 16536 - protein, 214 aa, Artificial Sequence; identical to SEQ ID NO: 16226
  Description of Artificial Sequence: Synthetic polypeptide
  XENP018111 1G6_H1.14_L1_IgG1_PVA_/S267K Light Chain

SEQ ID NO: 16537 - protein, 107 aa, Artificial Sequence; identical to SEQ ID NO: 10923
  Description of Artificial Sequence: Synthetic polypeptide
  VL of XENP018111

SEQ ID NO: 16538 - protein, 11 aa, Artificial Sequence
  Description of Artificial Sequence: Synthetic peptide
  XENP018111 vlCDR1
RASQSVSNDVA

SEQ ID NO: 16539 - protein, 7 aa, Artificial Sequence
  Description of Artificial Sequence: Synthetic peptide
  XENP018111 vlCDR2
YASHRYT

SEQ ID NO: 16540 - protein, 9 aa, Artificial Sequence
  Description of Artificial Sequence: Synthetic peptide
  XENP018111 vlCDR3
QQDYSSPRT

SEQ ID NO: 16541 - protein, 451 aa, Artificial Sequence
  Description of Artificial Sequence: Synthetic polypeptide
  XENP018112 1G6_H1.15_L1_IgG1_PVA_/S267K Heavy Chain
EVQLVESGGGLVKPGGSLRLSCAASGFTFHNYWMNWVRQAPGKGLEWVGEIRLKSNNYATHYAEPVKGRFTISRDDSKSTVYLQMNSLKTEDTAVYYCTRYYGNYGGYFDVWGAGTLVTVSSASTKGPSVFPLAPSSKSTSGGTAALGCLVKDYFPEPVTVSWNSGALTSGVHTFPAVLQSSGLYSLSSVVTVPSSSLGTQTYICNVNHKPSNTKVDKKVEPKSCDKTHTCPPCPAPPVAGPSVFLFPPKPKDTLMISRTPEVTCVVVDVKHEDPEVKFNWYVDGVEVHNAKTKPREEQYNSTYRVVSVLTVLHQDWLNGKEYKCKVSNKALPAPIEKTISKAKGQPREPQVYTLPPSREEMTKNQVSLTCLVKGFYPSDIAVEWESNGQPENNYKTTPPVLDSDGSFFLYSKLTVDKSRWQQGNVFSCSVMHEALHNHYTQKSLSLSPGK

SEQ ID NO: 16542 - protein, 122 aa, Artificial Sequence; identical to SEQ ID NO: 11165
  Description of Artificial Sequence: Synthetic polypeptide
  VH of XENP018112

SEQ ID NO: 16543 - protein, 5 aa, Artificial Sequence
  Description of Artificial Sequence: Synthetic peptide
  XENP018112 vhCDR1
NYWMN

SEQ ID NO: 16544 - protein, 19 aa, Artificial Sequence
  Description of Artificial Sequence: Synthetic peptide
  XENP018112 vhCDR2
EIRLKSNNYATHYAEPVKG

SEQ ID NO: 16545 - protein, 11 aa, Artificial Sequence
  Description of Artificial Sequence: Synthetic peptide
  XENP018112 vhCDR3
YYGNYGGYFDV

SEQ ID NO: 16546 - protein, 214 aa, Artificial Sequence; identical to SEQ ID NO: 16226
  Description of Artificial Sequence: Synthetic polypeptide
  XENP018112 1G6_H1.15_L1_IgG1_PVA_/S267K Light Chain

SEQ ID NO: 16547 - protein, 107 aa, Artificial Sequence; identical to SEQ ID NO: 10923
  Description of Artificial Sequence: Synthetic polypeptide
  VL of XENP018112

SEQ ID NO: 16548 - protein, 11 aa, Artificial Sequence
  Description of Artificial Sequence: Synthetic peptide
  XENP018112 vlCDR1
RASQSVSNDVA

SEQ ID NO: 16549 - protein, 7 aa, Artificial Sequence
  Description of Artificial Sequence: Synthetic peptide
  XENP018112 vlCDR2
YASHRYT

SEQ ID NO: 16550 - protein, 9 aa, Artificial Sequence
  Description of Artificial Sequence: Synthetic peptide
  XENP018112 vlCDR3
QQDYSSPRT

SEQ ID NO: 16551 - protein, 451 aa, Artificial Sequence
  Description of Artificial Sequence: Synthetic polypeptide
  XENP018113 1G6_H1.16_L1_IgG1_PVA_/S267K Heavy Chain
EVQLVESGGGLVKPGGSLRLSCAASGFTFDNYWMNWVRQAPGKGLEWVGEIRLKSNNYATHYAEPVKGRFTISRDDSKSTVYLQMNSLKTEDTAVYYCTRYYGNYGGYFDVWGAGTLVTVSSASTKGPSVFPLAPSSKSTSGGTAALGCLVKDYFPEPVTVSWNSGALTSGVHTFPAVLQSSGLYSLSSVVTVPSSSLGTQTYICNVNHKPSNTKVDKKVEPKSCDKTHTCPPCPAPPVAGPSVFLFPPKPKDTLMISRTPEVTCVVVDVKHEDPEVKFNWYVDGVEVHNAKTKPREEQYNSTYRVVSVLTVLHQDWLNGKEYKCKVSNKALPAPIEKTISKAKGQPREPQVYTLPPSREEMTKNQVSLTCLVKGFYPSDIAVEWESNGQPENNYKTTPPVLDSDGSFFLYSKLTVDKSRWQQGNVFSCSVMHEALHNHYTQKSLSLSPGK

SEQ ID NO: 16552 - protein, 122 aa, Artificial Sequence; identical to SEQ ID NO: 11174
  Description of Artificial Sequence: Synthetic polypeptide
  VH of XENP018113

SEQ ID NO: 16553 - protein, 5 aa, Artificial Sequence
  Description of Artificial Sequence: Synthetic peptide
  XENP018113 vhCDR1
NYWMN

SEQ ID NO: 16554 - protein, 19 aa, Artificial Sequence
  Description of Artificial Sequence: Synthetic peptide
  XENP018113 vhCDR2
EIRLKSNNYATHYAEPVKG

SEQ ID NO: 16555 - protein, 11 aa, Artificial Sequence
  Description of Artificial Sequence: Synthetic peptide
  XENP018113 vhCDR3
YYGNYGGYFDV

SEQ ID NO: 16556 - protein, 214 aa, Artificial Sequence; identical to SEQ ID NO: 16226
  Description of Artificial Sequence: Synthetic polypeptide
  XENP018113 1G6_H1.16_L1_IgG1_PVA_/S267K Light Chain

SEQ ID NO: 16557 - protein, 107 aa, Artificial Sequence; identical to SEQ ID NO: 10923
  Description of Artificial Sequence: Synthetic polypeptide
  VL of XENP018113

SEQ ID NO: 16558 - protein, 11 aa, Artificial Sequence
  Description of Artificial Sequence: Synthetic peptide
  XENP018113 vlCDR1
RASQSVSNDVA

SEQ ID NO: 16559 - protein, 7 aa, Artificial Sequence
  Description of Artificial Sequence: Synthetic peptide
  XENP018113 vlCDR2
YASHRYT

SEQ ID NO: 16560 - protein, 9 aa, Artificial Sequence
  Description of Artificial Sequence: Synthetic peptide
  XENP018113 vlCDR3
QQDYSSPRT

SEQ ID NO: 16561 - protein, 451 aa, Artificial Sequence
  Description of Artificial Sequence: Synthetic polypeptide
  XENP018114 1G6_H1.17_L1_IgG1_PVA_/S267K Heavy Chain
EVQLVESGGGLVKPGGSLRLSCAASGFTFKNYWMNWVRQAPGKGLEWVGEIRLKSNNYATHYAEPVKGRFTISRDDSKSTVYLQMNSLKTEDTAVYYCTRYYGNYGGYFDVWGAGTLVTVSSASTKGPSVFPLAPSSKSTSGGTAALGCLVKDYFPEPVTVSWNSGALTSGVHTFPAVLQSSGLYSLSSVVTVPSSSLGTQTYICNVNHKPSNTKVDKKVEPKSCDKTHTCPPCPAPPVAGPSVFLFPPKPKDTLMISRTPEVTCVVVDVKHEDPEVKFNWYVDGVEVHNAKTKPREEQYNSTYRVVSVLTVLHQDWLNGKEYKCKVSNKALPAPIEKTISKAKGQPREPQVYTLPPSREEMTKNQVSLTCLVKGFYPSDIAVEWESNGQPENNYKTTPPVLDSDGSFFLYSKLTVDKSRWQQGNVFSCSVMHEALHNHYTQKSLSLSPGK

SEQ ID NO: 16562 - protein, 122 aa, Artificial Sequence; identical to SEQ ID NO: 11183
  Description of Artificial Sequence: Synthetic polypeptide
  VH of XENP018114

SEQ ID NO: 16563 - protein, 5 aa, Artificial Sequence
  Description of Artificial Sequence: Synthetic peptide
  XENP018114 vhCDR1
NYWMN

SEQ ID NO: 16564 - protein, 19 aa, Artificial Sequence
  Description of Artificial Sequence: Synthetic peptide
  XENP018114 vhCDR2
EIRLKSNNYATHYAEPVKG

SEQ ID NO: 16565 - protein, 11 aa, Artificial Sequence
  Description of Artificial Sequence: Synthetic peptide
  XENP018114 vhCDR3
YYGNYGGYFDV

SEQ ID NO: 16566 - protein, 214 aa, Artificial Sequence; identical to SEQ ID NO: 16226
  Description of Artificial Sequence: Synthetic polypeptide
  XENP018114 1G6_H1.17_L1_IgG1_PVA_/S267K Light Chain

SEQ ID NO: 16567 - protein, 107 aa, Artificial Sequence; identical to SEQ ID NO: 10923
  Description of Artificial Sequence: Synthetic polypeptide
  VL of XENP018114

SEQ ID NO: 16568 - protein, 11 aa, Artificial Sequence
  Description of Artificial Sequence: Synthetic peptide
  XENP018114 vlCDR1
RASQSVSNDVA

SEQ ID NO: 16569 - protein, 7 aa, Artificial Sequence
  Description of Artificial Sequence: Synthetic peptide
  XENP018114 vlCDR2
YASHRYT

SEQ ID NO: 16570 - protein, 9 aa, Artificial Sequence
  Description of Artificial Sequence: Synthetic peptide
  XENP018114 vlCDR3
QQDYSSPRT

SEQ ID NO: 16571 - protein, 451 aa, Artificial Sequence
  Description of Artificial Sequence: Synthetic polypeptide
  XENP018115 1G6_H1.18_L1_IgG1_PVA_/S267K Heavy Chain
EVQLVESGGGLVKPGGSLRLSCAASGFTFYNYWMNWVRQAPGKGLEWVGEIRLKSNNYATHYAEPVKGRFTISRDDSKSTVYLQMNSLKTEDTAVYYCTRYYGNYGGYFDVWGAGTLVTVSSASTKGPSVFPLAPSSKSTSGGTAALGCLVKDYFPEPVTVSWNSGALTSGVHTFPAVLQSSGLYSLSSVVTVPSSSLGTQTYICNVNHKPSNTKVDKKVEPKSCDKTHTCPPCPAPPVAGPSVFLFPPKPKDTLMISRTPEVTCVVVDVKHEDPEVKFNWYVDGVEVHNAKTKPREEQYNSTYRVVSVLTVLHQDWLNGKEYKCKVSNKALPAPIEKTISKAKGQPREPQVYTLPPSREEMTKNQVSLTCLVKGFYPSDIAVEWESNGQPENNYKTTPPVLDSDGSFFLYSKLTVDKSRWQQGNVFSCSVMHEALHNHYTQKSLSLSPGK

SEQ ID NO: 16572 - protein, 122 aa, Artificial Sequence; identical to SEQ ID NO: 11192
  Description of Artificial Sequence: Synthetic polypeptide
  VH of XENP018115

SEQ ID NO: 16573 - protein, 5 aa, Artificial Sequence
  Description of Artificial Sequence: Synthetic peptide
  XENP018115 vhCDR1
NYWMN

SEQ ID NO: 16574 - protein, 19 aa, Artificial Sequence
  Description of Artificial Sequence: Synthetic peptide
  XENP018115 vhCDR2
EIRLKSNNYATHYAEPVKG

SEQ ID NO: 16575 - protein, 11 aa, Artificial Sequence
  Description of Artificial Sequence: Synthetic peptide
  XENP018115 vhCDR3
YYGNYGGYFDV

SEQ ID NO: 16576 - protein, 214 aa, Artificial Sequence; identical to SEQ ID NO: 16226
  Description of Artificial Sequence: Synthetic polypeptide
  XENP018115 1G6_H1.18_L1_IgG1_PVA_/S267K Light Chain

SEQ ID NO: 16577 - protein, 107 aa, Artificial Sequence; identical to SEQ ID NO: 10923
  Description of Artificial Sequence: Synthetic polypeptide
  VL of XENP018115

SEQ ID NO: 16578 - protein, 11 aa, Artificial Sequence
  Description of Artificial Sequence: Synthetic peptide
  XENP018115 vlCDR1
RASQSVSNDVA

SEQ ID NO: 16579 - protein, 7 aa, Artificial Sequence
  Description of Artificial Sequence: Synthetic peptide
  XENP018115 vlCDR2
YASHRYT

SEQ ID NO: 16580 - protein, 9 aa, Artificial Sequence
  Description of Artificial Sequence: Synthetic peptide
  XENP018115 vlCDR3
QQDYSSPRT

SEQ ID NO: 16581 - protein, 451 aa, Artificial Sequence
  Description of Artificial Sequence: Synthetic polypeptide
  XENP018116 1G6_H1.19_L1_IgG1_PVA_/S267K Heavy Chain
EVQLVESGGGLVKPGGSLRLSCAASGFTFSDYWMNWVRQAPGKGLEWVGEIRLKSNNYATHYAEPVKGRFTISRDDSKSTVYLQMNSLKTEDTAVYYCTRYYGNYGGYFDVWGAGTLVTVSSASTKGPSVFPLAPSSKSTSGGTAALGCLVKDYFPEPVTVSWNSGALTSGVHTFPAVLQSSGLYSLSSVVTVPSSSLGTQTYICNVNHKPSNTKVDKKVEPKSCDKTHTCPPCPAPPVAGPSVFLFPPKPKDTLMISRTPEVTCVVVDVKHEDPEVKFNWYVDGVEVHNAKTKPREEQYNSTYRVVSVLTVLHQDWLNGKEYKCKVSNKALPAPIEKTISKAKGQPREPQVYTLPPSREEMTKNQVSLTCLVKGFYPSDIAVEWESNGQPENNYKTTPPVLDSDGSFFLYSKLTVDKSRWQQGNVFSCSVMHEALHNHYTQKSLSLSPGK

SEQ ID NO: 16582 - protein, 122 aa, Artificial Sequence; identical to SEQ ID NO: 11201
  Description of Artificial Sequence: Synthetic polypeptide
  VH of XENP018116

SEQ ID NO: 16583 - protein, 5 aa, Artificial Sequence
  Description of Artificial Sequence: Synthetic peptide
  XENP018116 vhCDR1
DYWMN

SEQ ID NO: 16584 - protein, 19 aa, Artificial Sequence
  Description of Artificial Sequence: Synthetic peptide
  XENP018116 vhCDR2
EIRLKSNNYATHYAEPVKG

SEQ ID NO: 16585 - protein, 11 aa, Artificial Sequence
  Description of Artificial Sequence: Synthetic peptide
  XENP018116 vhCDR3
YYGNYGGYFDV

SEQ ID NO: 16586 - protein, 214 aa, Artificial Sequence; identical to SEQ ID NO: 16226
  Description of Artificial Sequence: Synthetic polypeptide
  XENP018116 1G6_H1.19_L1_IgG1_PVA_/S267K Light Chain

SEQ ID NO: 16587 - protein, 107 aa, Artificial Sequence; identical to SEQ ID NO: 10923
  Description of Artificial Sequence: Synthetic polypeptide
  VL of XENP018116

SEQ ID NO: 16588 - protein, 11 aa, Artificial Sequence
  Description of Artificial Sequence: Synthetic peptide
  XENP018116 vlCDR1
RASQSVSNDVA

SEQ ID NO: 16589 - protein, 7 aa, Artificial Sequence
  Description of Artificial Sequence: Synthetic peptide
  XENP018116 vlCDR2
YASHRYT

SEQ ID NO: 16590 - protein, 9 aa, Artificial Sequence
  Description of Artificial Sequence: Synthetic peptide
  XENP018116 vlCDR3
QQDYSSPRT

SEQ ID NO: 16591 - protein, 451 aa, Artificial Sequence
  Description of Artificial Sequence: Synthetic polypeptide
  XENP018117 1G6_H1.20_L1_IgG1_PVA_/S267K Heavy Chain
EVQLVESGGGLVKPGGSLRLSCAASGFTFSHYWMNWVRQAPGKGLEWVGEIRLKSNNYATHYAEPVKGRFTISRDDSKSTVYLQMNSLKTEDTAVYYCTRYYGNYGGYFDVWGAGTLVTVSSASTKGPSVFPLAPSSKSTSGGTAALGCLVKDYFPEPVTVSWNSGALTSGVHTFPAVLQSSGLYSLSSVVTVPSSSLGTQTYICNVNHKPSNTKVDKKVEPKSCDKTHTCPPCPAPPVAGPSVFLFPPKPKDTLMISRTPEVTCVVVDVKHEDPEVKFNWYVDGVEVHNAKTKPREEQYNSTYRVVSVLTVLHQDWLNGKEYKCKVSNKALPAPIEKTISKAKGQPREPQVYTLPPSREEMTKNQVSLTCLVKGFYPSDIAVEWESNGQPENNYKTTPPVLDSDGSFFLYSKLTVDKSRWQQGNVFSCSVMHEALHNHYTQKSLSLSPGK

SEQ ID NO: 16592 - protein, 122 aa, Artificial Sequence; identical to SEQ ID NO: 11210
  Description of Artificial Sequence: Synthetic polypeptide
  VH of XENP018117

SEQ ID NO: 16593 - protein, 5 aa, Artificial Sequence
  Description of Artificial Sequence: Synthetic peptide
  XENP018117 vhCDR1
HYWMN

SEQ ID NO: 16594 - protein, 19 aa, Artificial Sequence
  Description of Artificial Sequence: Synthetic peptide
  XENP018117 vhCDR2
EIRLKSNNYATHYAEPVKG

SEQ ID NO: 16595 - protein, 11 aa, Artificial Sequence
  Description of Artificial Sequence: Synthetic peptide
  XENP018117 vhCDR3
YYGNYGGYFDV

SEQ ID NO: 16596 - protein, 214 aa, Artificial Sequence; identical to SEQ ID NO: 16226
  Description of Artificial Sequence: Synthetic polypeptide
  XENP018117 1G6_H1.20_L1_IgG1_PVA_/S267K Light Chain

SEQ ID NO: 16597 - protein, 107 aa, Artificial Sequence; identical to SEQ ID NO: 10923
  Description of Artificial Sequence: Synthetic polypeptide
  VL of XENP018117

SEQ ID NO: 16598 - protein, 11 aa, Artificial Sequence
  Description of Artificial Sequence: Synthetic peptide
  XENP018117 vlCDR1
RASQSVSNDVA

SEQ ID NO: 16599 - protein, 7 aa, Artificial Sequence
  Description of Artificial Sequence: Synthetic peptide
  XENP018117 vlCDR2
YASHRYT

SEQ ID NO: 16600 - protein, 9 aa, Artificial Sequence
  Description of Artificial Sequence: Synthetic peptide
  XENP018117 vlCDR3
QQDYSSPRT

SEQ ID NO: 16601 - protein, 451 aa, Artificial Sequence
  Description of Artificial Sequence: Synthetic polypeptide
  XENP018118 1G6_H1.21_L1_IgG1_PVA_/S267K Heavy Chain
EVQLVESGGGLVKPGGSLRLSCAASGFTFSEYWMNWVRQAPGKGLEWVGEIRLKSNNYATHYAEPVKGRFTISRDDSKSTVYLQMNSLKTEDTAVYYCTRYYGNYGGYFDVWGAGTLVTVSSASTKGPSVFPLAPSSKSTSGGTAALGCLVKDYFPEPVTVSWNSGALTSGVHTFPAVLQSSGLYSLSSVVTVPSSSLGTQTYICNVNHKPSNTKVDKKVEPKSCDKTHTCPPCPAPPVAGPSVFLFPPKPKDTLMISRTPEVTCVVVDVKHEDPEVKFNWYVDGVEVHNAKTKPREEQYNSTYRVVSVLTVLHQDWLNGKEYKCKVSNKALPAPIEKTISKAKGQPREPQVYTLPPSREEMTKNQVSLTCLVKGFYPSDIAVEWESNGQPENNYKTTPPVLDSDGSFFLYSKLTVDKSRWQQGNVFSCSVMHEALHNHYTQKSLSLSPGK

SEQ ID NO: 16602 - protein, 122 aa, Artificial Sequence; identical to SEQ ID NO: 11219
  Description of Artificial Sequence: Synthetic polypeptide
  VH of XENP018118

SEQ ID NO: 16603 - protein, 5 aa, Artificial Sequence
  Description of Artificial Sequence: Synthetic peptide
  XENP018118 vhCDR1
EYWMN

SEQ ID NO: 16604 - protein, 19 aa, Artificial Sequence
  Description of Artificial Sequence: Synthetic peptide
  XENP018118 vhCDR2
EIRLKSNNYATHYAEPVKG

SEQ ID NO: 16605 - protein, 11 aa, Artificial Sequence
  Description of Artificial Sequence: Synthetic peptide
  XENP018118 vhCDR3
YYGNYGGYFDV

SEQ ID NO: 16606 - protein, 214 aa, Artificial Sequence; identical to SEQ ID NO: 16226
  Description of Artificial Sequence: Synthetic polypeptide
  XENP018118 1G6_H1.21_L1_IgG1_PVA_/S267K Light Chain

SEQ ID NO: 16607 - protein, 107 aa, Artificial Sequence; identical to SEQ ID NO: 10923
  Description of Artificial Sequence: Synthetic polypeptide
  VL of XENP018118

SEQ ID NO: 16608 - protein, 11 aa, Artificial Sequence
  Description of Artificial Sequence: Synthetic peptide
  XENP018118 vlCDR1
RASQSVSNDVA

SEQ ID NO: 16609 - protein, 7 aa, Artificial Sequence
  Description of Artificial Sequence: Synthetic peptide
  XENP018118 vlCDR2
YASHRYT

SEQ ID NO: 16610 - protein, 9 aa, Artificial Sequence
  Description of Artificial Sequence: Synthetic peptide
  XENP018118 vlCDR3
QQDYSSPRT

SEQ ID NO: 16611 - protein, 451 aa, Artificial Sequence
  Description of Artificial Sequence: Synthetic polypeptide
  XENP018119 1G6_H1.22_L1_IgG1_PVA_/S267K Heavy Chain
EVQLVESGGGLVKPGGSLRLSCAASGFTFSSYWMNWVRQAPGKGLEWVGEIRLKSNNYATHYAEPVKGRFTISRDDSKSTVYLQMNSLKTEDTAVYYCTRYYGNYGGYFDVWGAGTLVTVSSASTKGPSVFPLAPSSKSTSGGTAALGCLVKDYFPEPVTVSWNSGALTSGVHTFPAVLQSSGLYSLSSVVTVPSSSLGTQTYICNVNHKPSNTKVDKKVEPKSCDKTHTCPPCPAPPVAGPSVFLFPPKPKDTLMISRTPEVTCVVVDVKHEDPEVKFNWYVDGVEVHNAKTKPREEQYNSTYRVVSVLTVLHQDWLNGKEYKCKVSNKALPAPIEKTISKAKGQPREPQVYTLPPSREEMTKNQVSLTCLVKGFYPSDIAVEWESNGQPENNYKTTPPVLDSDGSFFLYSKLTVDKSRWQQGNVFSCSVMHEALHNHYTQKSLSLSPGK

SEQ ID NO: 16612 - protein, 122 aa, Artificial Sequence; identical to SEQ ID NO: 11228
  Description of Artificial Sequence: Synthetic polypeptide
  VH of XENP018119

SEQ ID NO: 16613 - protein, 5 aa, Artificial Sequence
  Description of Artificial Sequence: Synthetic peptide
  XENP018119 vhCDR1
SYWMN

SEQ ID NO: 16614 - protein, 19 aa, Artificial Sequence
  Description of Artificial Sequence: Synthetic peptide
  XENP018119 vhCDR2
EIRLKSNNYATHYAEPVKG

SEQ ID NO: 16615 - protein, 11 aa, Artificial Sequence
  Description of Artificial Sequence: Synthetic peptide
  XENP018119 vhCDR3
YYGNYGGYFDV

SEQ ID NO: 16616 - protein, 214 aa, Artificial Sequence; identical to SEQ ID NO: 16226
  Description of Artificial Sequence: Synthetic polypeptide
  XENP018119 1G6_H1.22_L1_IgG1_PVA_/S267K Light Chain

SEQ ID NO: 16617 - protein, 107 aa, Artificial Sequence; identical to SEQ ID NO: 10923
  Description of Artificial Sequence: Synthetic polypeptide
  VL of XENP018119

SEQ ID NO: 16618 - protein, 11 aa, Artificial Sequence
  Description of Artificial Sequence: Synthetic peptide
  XENP018119 vlCDR1
RASQSVSNDVA

SEQ ID NO: 16619 - protein, 7 aa, Artificial Sequence
  Description of Artificial Sequence: Synthetic peptide
  XENP018119 vlCDR2
YASHRYT

SEQ ID NO: 16620 - protein, 9 aa, Artificial Sequence
  Description of Artificial Sequence: Synthetic peptide
  XENP018119 vlCDR3
QQDYSSPRT

SEQ ID NO: 16621 - protein, 451 aa, Artificial Sequence
  Description of Artificial Sequence: Synthetic polypeptide
  XENP018120 1G6_H1.23_L1_IgG1_PVA_/S267K Heavy Chain
EVQLVESGGGLVKPGGSLRLSCAASGFTFSRYWMNWVRQAPGKGLEWVGEIRLKSNNYATHYAEPVKGRFTISRDDSKSTVYLQMNSLKTEDTAVYYCTRYYGNYGGYFDVWGAGTLVTVSSASTKGPSVFPLAPSSKSTSGGTAALGCLVKDYFPEPVTVSWNSGALTSGVHTFPAVLQSSGLYSLSSVVTVPSSSLGTQTYICNVNHKPSNTKVDKKVEPKSCDKTHTCPPCPAPPVAGPSVFLFPPKPKDTLMISRTPEVTCVVVDVKHEDPEVKFNWYVDGVEVHNAKTKPREEQYNSTYRVVSVLTVLHQDWLNGKEYKCKVSNKALPAPIEKTISKAKGQPREPQVYTLPPSREEMTKNQVSLTCLVKGFYPSDIAVEWESNGQPENNYKTTPPVLDSDGSFFLYSKLTVDKSRWQQGNVFSCSVMHEALHNHYTQKSLSLSPGK

SEQ ID NO: 16622 - protein, 122 aa, Artificial Sequence; identical to SEQ ID NO: 11237
  Description of Artificial Sequence: Synthetic polypeptide
  VH of XENP018120

SEQ ID NO: 16623 - protein, 5 aa, Artificial Sequence
  Description of Artificial Sequence: Synthetic peptide
  XENP018120 vhCDR1
RYWMN

SEQ ID NO: 16624 - protein, 19 aa, Artificial Sequence
  Description of Artificial Sequence: Synthetic peptide
  XENP018120 vhCDR2
EIRLKSNNYATHYAEPVKG

SEQ ID NO: 16625 - protein, 11 aa, Artificial Sequence
  Description of Artificial Sequence: Synthetic peptide
  XENP018120 vhCDR3
YYGNYGGYFDV

SEQ ID NO: 16626 - protein, 214 aa, Artificial Sequence; identical to SEQ ID NO: 16226
  Description of Artificial Sequence: Synthetic polypeptide
  XENP018120 1G6_H1.23_L1_IgG1_PVA_/S267K Light Chain

SEQ ID NO: 16627 - protein, 107 aa, Artificial Sequence; identical to SEQ ID NO: 10923
  Description of Artificial Sequence: Synthetic polypeptide
  VL of XENP018120

SEQ ID NO: 16628 - protein, 11 aa, Artificial Sequence
  Description of Artificial Sequence: Synthetic peptide
  XENP018120 vlCDR1
RASQSVSNDVA

SEQ ID NO: 16629 - protein, 7 aa, Artificial Sequence
  Description of Artificial Sequence: Synthetic peptide
  XENP018120 vlCDR2
YASHRYT

SEQ ID NO: 16630 - protein, 9 aa, Artificial Sequence
  Description of Artificial Sequence: Synthetic peptide
  XENP018120 vlCDR3
QQDYSSPRT

SEQ ID NO: 16631 - protein, 451 aa, Artificial Sequence
  Description of Artificial Sequence: Synthetic polypeptide
  XENP018121 1G6_H1.24_L1_IgG1_PVA_/S267K Heavy Chain
EVQLVESGGGLVKPGGSLRLSCAASGFTFSLYWMNWVRQAPGKGLEWVGEIRLKSNNYATHYAEPVKGRFTISRDDSKSTVYLQMNSLKTEDTAVYYCTRYYGNYGGYFDVWGAGTLVTVSSASTKGPSVFPLAPSSKSTSGGTAALGCLVKDYFPEPVTVSWNSGALTSGVHTFPAVLQSSGLYSLSSVVTVPSSSLGTQTYICNVNHKPSNTKVDKKVEPKSCDKTHTCPPCPAPPVAGPSVFLFPPKPKDTLMISRTPEVTCVVVDVKHEDPEVKFNWYVDGVEVHNAKTKPREEQYNSTYRVVSVLTVLHQDWLNGKEYKCKVSNKALPAPIEKTISKAKGQPREPQVYTLPPSREEMTKNQVSLTCLVKGFYPSDIAVEWESNGQPENNYKTTPPVLDSDGSFFLYSKLTVDKSRWQQGNVFSCSVMHEALHNHYTQKSLSLSPGK

SEQ ID NO: 16632 - protein, 122 aa, Artificial Sequence; identical to SEQ ID NO: 11246
  Description of Artificial Sequence: Synthetic polypeptide
  VH of XENP018121

SEQ ID NO: 16633 - protein, 5 aa, Artificial Sequence
  Description of Artificial Sequence: Synthetic peptide
  XENP018121 vhCDR1
LYWMN

SEQ ID NO: 16634 - protein, 19 aa, Artificial Sequence
  Description of Artificial Sequence: Synthetic peptide
  XENP018121 vhCDR2
EIRLKSNNYATHYAEPVKG

SEQ ID NO: 16635 - protein, 11 aa, Artificial Sequence
  Description of Artificial Sequence: Synthetic peptide
  XENP018121 vhCDR3
YYGNYGGYFDV

SEQ ID NO: 16636 - protein, 214 aa, Artificial Sequence; identical to SEQ ID NO: 16226
  Description of Artificial Sequence: Synthetic polypeptide
  XENP018121 1G6_H1.24_L1_IgG1_PVA_/S267K Light Chain

SEQ ID NO: 16637 - protein, 107 aa, Artificial Sequence; identical to SEQ ID NO: 10923
  Description of Artificial Sequence: Synthetic polypeptide
  VL of XENP018121

SEQ ID NO: 16638 - protein, 11 aa, Artificial Sequence
  Description of Artificial Sequence: Synthetic peptide
  XENP018121 vlCDR1
RASQSVSNDVA

SEQ ID NO: 16639 - protein, 7 aa, Artificial Sequence
  Description of Artificial Sequence: Synthetic peptide
  XENP018121 vlCDR2
YASHRYT

SEQ ID NO: 16640 - protein, 9 aa, Artificial Sequence
  Description of Artificial Sequence: Synthetic peptide
  XENP018121 vlCDR3
QQDYSSPRT

SEQ ID NO: 16641 - protein, 451 aa, Artificial Sequence
  Description of Artificial Sequence: Synthetic polypeptide
  XENP018122 1G6_H1.25_L1_IgG1_PVA_/S267K Heavy Chain
EVQLVESGGGLVKPGGSLRLSCAASGFTFSTYWMNWVRQAPGKGLEWVGEIRLKSNNYATHYAEPVKGRFTISRDDSKSTVYLQMNSLKTEDTAVYYCTRYYGNYGGYFDVWGAGTLVTVSSASTKGPSVFPLAPSSKSTSGGTAALGCLVKDYFPEPVTVSWNSGALTSGVHTFPAVLQSSGLYSLSSVVTVPSSSLGTQTYICNVNHKPSNTKVDKKVEPKSCDKTHTCPPCPAPPVAGPSVFLFPPKPKDTLMISRTPEVTCVVVDVKHEDPEVKFNWYVDGVEVHNAKTKPREEQYNSTYRVVSVLTVLHQDWLNGKEYKCKVSNKALPAPIEKTISKAKGQPREPQVYTLPPSREEMTKNQVSLTCLVKGFYPSDIAVEWESNGQPENNYKTTPPVLDSDGSFFLYSKLTVDKSRWQQGNVFSCSVMHEALHNHYTQKSLSLSPGK

SEQ ID NO: 16642 - protein, 122 aa, Artificial Sequence; identical to SEQ ID NO: 11255
  Description of Artificial Sequence: Synthetic polypeptide
  VH of XENP018122

SEQ ID NO: 16643 - protein, 5 aa, Artificial Sequence
  Description of Artificial Sequence: Synthetic peptide
  XENP018122 vhCDR1
TYWMN

SEQ ID NO: 16644 - protein, 19 aa, Artificial Sequence
  Description of Artificial Sequence: Synthetic peptide
  XENP018122 vhCDR2
EIRLKSNNYATHYAEPVKG

SEQ ID NO: 16645 - protein, 11 aa, Artificial Sequence
  Description of Artificial Sequence: Synthetic peptide
  XENP018122 vhCDR3
YYGNYGGYFDV

SEQ ID NO: 16646 - protein, 214 aa, Artificial Sequence; identical to SEQ ID NO: 16226
  Description of Artificial Sequence: Synthetic polypeptide
  XENP018122 1G6_H1.25_L1_IgG1_PVA_/S267K Light Chain

SEQ ID NO: 16647 - protein, 107 aa, Artificial Sequence; identical to SEQ ID NO: 10923
  Description of Artificial Sequence: Synthetic polypeptide
  VL of XENP018122

SEQ ID NO: 16648 - protein, 11 aa, Artificial Sequence
  Description of Artificial Sequence: Synthetic peptide
  XENP018122 vlCDR1
RASQSVSNDVA

SEQ ID NO: 16649 - protein, 7 aa, Artificial Sequence
  Description of Artificial Sequence: Synthetic peptide
  XENP018122 vlCDR2
YASHRYT

SEQ ID NO: 16650 - protein, 9 aa, Artificial Sequence
  Description of Artificial Sequence: Synthetic peptide
  XENP018122 vlCDR3
QQDYSSPRT

SEQ ID NO: 16651 - protein, 451 aa, Artificial Sequence
  Description of Artificial Sequence: Synthetic polypeptide
  XENP018123 1G6_H1.26_L1_IgG1_PVA_/S267K Heavy Chain
EVQLVESGGGLVKPGGSLRLSCAASGFTFSGYWMNWVRQAPGKGLEWVGEIRLKSNNYATHYAEPVKGRFTISRDDSKSTVYLQMNSLKTEDTAVYYCTRYYGNYGGYFDVWGAGTLVTVSSASTKGPSVFPLAPSSKSTSGGTAALGCLVKDYFPEPVTVSWNSGALTSGVHTFPAVLQSSGLYSLSSVVTVPSSSLGTQTYICNVNHKPSNTKVDKKVEPKSCDKTHTCPPCPAPPVAGPSVFLFPPKPKDTLMISRTPEVTCVVVDVKHEDPEVKFNWYVDGVEVHNAKTKPREEQYNSTYRVVSVLTVLHQDWLNGKEYKCKVSNKALPAPIEKTISKAKGQPREPQVYTLPPSREEMTKNQVSLTCLVKGFYPSDIAVEWESNGQPENNYKTTPPVLDSDGSFFLYSKLTVDKSRWQQGNVFSCSVMHEALHNHYTQKSLSLSPGK

SEQ ID NO: 16652 - protein, 122 aa, Artificial Sequence; identical to SEQ ID NO: 11264
  Description of Artificial Sequence: Synthetic polypeptide
  VH of XENP018123

SEQ ID NO: 16653 - protein, 5 aa, Artificial Sequence
  Description of Artificial Sequence: Synthetic peptide
  XENP018123 vhCDR1
GYWMN

SEQ ID NO: 16654 - protein, 19 aa, Artificial Sequence
  Description of Artificial Sequence: Synthetic peptide
  XENP018123 vhCDR2
EIRLKSNNYATHYAEPVKG

SEQ ID NO: 16655 - protein, 11 aa, Artificial Sequence
  Description of Artificial Sequence: Synthetic peptide
  XENP018123 vhCDR3
YYGNYGGYFDV

SEQ ID NO: 16656 - protein, 214 aa, Artificial Sequence; identical to SEQ ID NO: 16226
  Description of Artificial Sequence: Synthetic polypeptide
  XENP018123 1G6_H1.26_L1_IgG1_PVA_/S267K Light Chain

SEQ ID NO: 16657 - protein, 107 aa, Artificial Sequence; identical to SEQ ID NO: 10923
  Description of Artificial Sequence: Synthetic polypeptide
  VL of XENP018123

SEQ ID NO: 16658 - protein, 11 aa, Artificial Sequence
  Description of Artificial Sequence: Synthetic peptide
  XENP018123 vlCDR1
RASQSVSNDVA

SEQ ID NO: 16659 - protein, 7 aa, Artificial Sequence
  Description of Artificial Sequence: Synthetic peptide
  XENP018123 vlCDR2
YASHRYT

SEQ ID NO: 16660 - protein, 9 aa, Artificial Sequence
  Description of Artificial Sequence: Synthetic peptide
  XENP018123 vlCDR3
QQDYSSPRT

SEQ ID NO: 16661 - protein, 451 aa, Artificial Sequence
  Description of Artificial Sequence: Synthetic polypeptide
  XENP018124 1G6_H1.27_L1_IgG1_PVA_/S267K Heavy Chain
EVQLVESGGGLVKPGGSLRLSCAASGFTFSYYWMNWVRQAPGKGLEWVGEIRLKSNNYATHYAEPVKGRFTISRDDSKSTVYLQMNSLKTEDTAVYYCTRYYGNYGGYFDVWGAGTLVTVSSASTKGPSVFPLAPSSKSTSGGTAALGCLVKDYFPEPVTVSWNSGALTSGVHTFPAVLQSSGLYSLSSVVTVPSSSLGTQTYICNVNHKPSNTKVDKKVEPKSCDKTHTCPPCPAPPVAGPSVFLFPPKPKDTLMISRTPEVTCVVVDVKHEDPEVKFNWYVDGVEVHNAKTKPREEQYNSTYRVVSVLTVLHQDWLNGKEYKCKVSNKALPAPIEKTISKAKGQPREPQVYTLPPSREEMTKNQVSLTCLVKGFYPSDIAVEWESNGQPENNYKTTPPVLDSDGSFFLYSKLTVDKSRWQQGNVFSCSVMHEALHNHYTQKSLSLSPGK

SEQ ID NO: 16662 - protein, 122 aa, Artificial Sequence; identical to SEQ ID NO: 11273
  Description of Artificial Sequence: Synthetic polypeptide
  VH of XENP018124

SEQ ID NO: 16663 - protein, 5 aa, Artificial Sequence
  Description of Artificial Sequence: Synthetic peptide
  XENP018124 vhCDR1
YYWMN

SEQ ID NO: 16664 - protein, 19 aa, Artificial Sequence
  Description of Artificial Sequence: Synthetic peptide
  XENP018124 vhCDR2
EIRLKSNNYATHYAEPVKG

SEQ ID NO: 16665 - protein, 11 aa, Artificial Sequence
  Description of Artificial Sequence: Synthetic peptide
  XENP018124 vhCDR3
YYGNYGGYFDV

SEQ ID NO: 16666 - protein, 214 aa, Artificial Sequence; identical to SEQ ID NO: 16226
  Description of Artificial Sequence: Synthetic polypeptide
  XENP018124 1G6_H1.27_L1_IgG1_PVA_/S267K Light Chain

SEQ ID NO: 16667 - protein, 107 aa, Artificial Sequence; identical to SEQ ID NO: 10923
  Description of Artificial Sequence: Synthetic polypeptide
  VL of XENP018124

SEQ ID NO: 16668 - protein, 11 aa, Artificial Sequence
  Description of Artificial Sequence: Synthetic peptide
  XENP018124 vlCDR1
RASQSVSNDVA

SEQ ID NO: 16669 - protein, 7 aa, Artificial Sequence
  Description of Artificial Sequence: Synthetic peptide
  XENP018124 vlCDR2
YASHRYT

SEQ ID NO: 16670 - protein, 9 aa, Artificial Sequence
  Description of Artificial Sequence: Synthetic peptide
  XENP018124 vlCDR3
QQDYSSPRT

SEQ ID NO: 16671 - protein, 451 aa, Artificial Sequence
  Description of Artificial Sequence: Synthetic polypeptide
  XENP018125 1G6_H1.28_L1_IgG1_PVA_/S267K Heavy Chain
EVQLVESGGGLVKPGGSLRLSCAASGFTFSNFWMNWVRQAPGKGLEWVGEIRLKSNNYATHYAEPVKGRFTISRDDSKSTVYLQMNSLKTEDTAVYYCTRYYGNYGGYFDVWGAGTLVTVSSASTKGPSVFPLAPSSKSTSGGTAALGCLVKDYFPEPVTVSWNSGALTSGVHTFPAVLQSSGLYSLSSVVTVPSSSLGTQTYICNVNHKPSNTKVDKKVEPKSCDKTHTCPPCPAPPVAGPSVFLFPPKPKDTLMISRTPEVTCVVVDVKHEDPEVKFNWYVDGVEVHNAKTKPREEQYNSTYRVVSVLTVLHQDWLNGKEYKCKVSNKALPAPIEKTISKAKGQPREPQVYTLPPSREEMTKNQVSLTCLVKGFYPSDIAVEWESNGQPENNYKTTPPVLDSDGSFFLYSKLTVDKSRWQQGNVFSCSVMHEALHNHYTQKSLSLSPGK

SEQ ID NO: 16672 - protein, 122 aa, Artificial Sequence; identical to SEQ ID NO: 11282
  Description of Artificial Sequence: Synthetic polypeptide
  VH of XENP018125

SEQ ID NO: 16673 - protein, 5 aa, Artificial Sequence
  Description of Artificial Sequence: Synthetic peptide
  XENP018125 vhCDR1
NFWMN

SEQ ID NO: 16674 - protein, 19 aa, Artificial Sequence
  Description of Artificial Sequence: Synthetic peptide
  XENP018125 vhCDR2
EIRLKSNNYATHYAEPVKG

SEQ ID NO: 16675 - protein, 11 aa, Artificial Sequence
  Description of Artificial Sequence: Synthetic peptide
  XENP018125 vhCDR3
YYGNYGGYFDV

SEQ ID NO: 16676 - protein, 214 aa, Artificial Sequence; identical to SEQ ID NO: 16226
  Description of Artificial Sequence: Synthetic polypeptide
  XENP018125 1G6_H1.28_L1_IgG1_PVA_/S267K Light Chain

SEQ ID NO: 16677 - protein, 107 aa, Artificial Sequence; identical to SEQ ID NO: 10923
  Description of Artificial Sequence: Synthetic polypeptide
  VL of XENP018125

SEQ ID NO: 16678 - protein, 11 aa, Artificial Sequence
  Description of Artificial Sequence: Synthetic peptide
  XENP018125 vlCDR1
RASQSVSNDVA

SEQ ID NO: 16679 - protein, 7 aa, Artificial Sequence
  Description of Artificial Sequence: Synthetic peptide
  XENP018125 vlCDR2
YASHRYT

SEQ ID NO: 16680 - protein, 9 aa, Artificial Sequence
  Description of Artificial Sequence: Synthetic peptide
  XENP018125 vlCDR3
QQDYSSPRT

SEQ ID NO: 16681 - protein, 451 aa, Artificial Sequence
  Description of Artificial Sequence: Synthetic polypeptide
  XENP018126 1G6_H1.29_L1_IgG1_PVA_/S267K Heavy Chain
EVQLVESGGGLVKPGGSLRLSCAASGFTFSNHWMNWVRQAPGKGLEWVGEIRLKSNNYATHYAEPVKGRFTISRDDSKSTVYLQMNSLKTEDTAVYYCTRYYGNYGGYFDVWGAGTLVTVSSASTKGPSVFPLAPSSKSTSGGTAALGCLVKDYFPEPVTVSWNSGALTSGVHTFPAVLQSSGLYSLSSVVTVPSSSLGTQTYICNVNHKPSNTKVDKKVEPKSCDKTHTCPPCPAPPVAGPSVFLFPPKPKDTLMISRTPEVTCVVVDVKHEDPEVKFNWYVDGVEVHNAKTKPREEQYNSTYRVVSVLTVLHQDWLNGKEYKCKVSNKALPAPIEKTISKAKGQPREPQVYTLPPSREEMTKNQVSLTCLVKGFYPSDIAVEWESNGQPENNYKTTPPVLDSDGSFFLYSKLTVDKSRWQQGNVFSCSVMHEALHNHYTQKSLSLSPGK

SEQ ID NO: 16682 - protein, 122 aa, Artificial Sequence; identical to SEQ ID NO: 11291
  Description of Artificial Sequence: Synthetic polypeptide
  VH of XENP018126

SEQ ID NO: 16683 - protein, 5 aa, Artificial Sequence
  Description of Artificial Sequence: Synthetic peptide
  XENP018126 vhCDR1
NHWMN

SEQ ID NO: 16684 - protein, 19 aa, Artificial Sequence
  Description of Artificial Sequence: Synthetic peptide
  XENP018126 vhCDR2
EIRLKSNNYATHYAEPVKG

SEQ ID NO: 16685 - protein, 11 aa, Artificial Sequence
  Description of Artificial Sequence: Synthetic peptide
  XENP018126 vhCDR3
YYGNYGGYFDV

SEQ ID NO: 16686 - protein, 214 aa, Artificial Sequence; identical to SEQ ID NO: 16226
  Description of Artificial Sequence: Synthetic polypeptide
  XENP018126 1G6_H1.29_L1_IgG1_PVA_/S267K Light Chain

SEQ ID NO: 16687 - protein, 107 aa, Artificial Sequence; identical to SEQ ID NO: 10923
  Description of Artificial Sequence: Synthetic polypeptide
  VL of XENP018126

SEQ ID NO: 16688 - protein, 11 aa, Artificial Sequence
  Description of Artificial Sequence: Synthetic peptide
  XENP018126 vlCDR1
RASQSVSNDVA

SEQ ID NO: 16689 - protein, 7 aa, Artificial Sequence
  Description of Artificial Sequence: Synthetic peptide
  XENP018126 vlCDR2
YASHRYT

SEQ ID NO: 16690 - protein, 9 aa, Artificial Sequence
  Description of Artificial Sequence: Synthetic peptide
  XENP018126 vlCDR3
QQDYSSPRT

SEQ ID NO: 16691 - protein, 451 aa, Artificial Sequence
  Description of Artificial Sequence: Synthetic polypeptide
  XENP018127 1G6_H1.30_L1_IgG1_PVA_/S267K Heavy Chain
EVQLVESGGGLVKPGGSLRLSCAASGFTFSNLWMNWVRQAPGKGLEWVGEIRLKSNNYATHYAEPVKGRFTISRDDSKSTVYLQMNSLKTEDTAVYYCTRYYGNYGGYFDVWGAGTLVTVSSASTKGPSVFPLAPSSKSTSGGTAALGCLVKDYFPEPVTVSWNSGALTSGVHTFPAVLQSSGLYSLSSVVTVPSSSLGTQTYICNVNHKPSNTKVDKKVEPKSCDKTHTCPPCPAPPVAGPSVFLFPPKPKDTLMISRTPEVTCVVVDVKHEDPEVKFNWYVDGVEVHNAKTKPREEQYNSTYRVVSVLTVLHQDWLNGKEYKCKVSNKALPAPIEKTISKAKGQPREPQVYTLPPSREEMTKNQVSLTCLVKGFYPSDIAVEWESNGQPENNYKTTPPVLDSDGSFFLYSKLTVDKSRWQQGNVFSCSVMHEALHNHYTQKSLSLSPGK

SEQ ID NO: 16692 - protein, 122 aa, Artificial Sequence; identical to SEQ ID NO: 11300
  Description of Artificial Sequence: Synthetic polypeptide
  VH of XENP018127

SEQ ID NO: 16693 - protein, 5 aa, Artificial Sequence
  Description of Artificial Sequence: Synthetic peptide
  XENP018127 vhCDR1
NLWMN

SEQ ID NO: 16694 - protein, 19 aa, Artificial Sequence
  Description of Artificial Sequence: Synthetic peptide
  XENP018127 vhCDR2
EIRLKSNNYATHYAEPVKG

SEQ ID NO: 16695 - protein, 11 aa, Artificial Sequence
  Description of Artificial Sequence: Synthetic peptide
  XENP018127 vhCDR3
YYGNYGGYFDV

SEQ ID NO: 16696 - protein, 214 aa, Artificial Sequence; identical to SEQ ID NO: 16226
  Description of Artificial Sequence: Synthetic polypeptide
  XENP018127 1G6_H1.30_L1_IgG1_PVA_/S267K Light Chain

SEQ ID NO: 16697 - protein, 107 aa, Artificial Sequence; identical to SEQ ID NO: 10923
  Description of Artificial Sequence: Synthetic polypeptide
  VL of XENP018127

SEQ ID NO: 16698 - protein, 11 aa, Artificial Sequence
  Description of Artificial Sequence: Synthetic peptide
  XENP018127 vlCDR1
RASQSVSNDVA

SEQ ID NO: 16699 - protein, 7 aa, Artificial Sequence
  Description of Artificial Sequence: Synthetic peptide
  XENP018127 vlCDR2
YASHRYT

SEQ ID NO: 16700 - protein, 9 aa, Artificial Sequence
  Description of Artificial Sequence: Synthetic peptide
  XENP018127 vlCDR3
QQDYSSPRT

SEQ ID NO: 16701 - protein, 451 aa, Artificial Sequence
  Description of Artificial Sequence: Synthetic polypeptide
  XENP018128 1G6_H1.31_L1_IgG1_PVA_/S267K Heavy Chain
EVQLVESGGGLVKPGGSLRLSCAASGFTFSNWWMNWVRQAPGKGLEWVGEIRLKSNNYATHYAEPVKGRFTISRDDSKSTVYLQMNSLKTEDTAVYYCTRYYGNYGGYFDVWGAGTLVTVSSASTKGPSVFPLAPSSKSTSGGTAALGCLVKDYFPEPVTVSWNSGALTSGVHTFPAVLQSSGLYSLSSVVTVPSSSLGTQTYICNVNHKPSNTKVDKKVEPKSCDKTHTCPPCPAPPVAGPSVFLFPPKPKDTLMISRTPEVTCVVVDVKHEDPEVKFNWYVDGVEVHNAKTKPREEQYNSTYRVVSVLTVLHQDWLNGKEYKCKVSNKALPAPIEKTISKAKGQPREPQVYTLPPSREEMTKNQVSLTCLVKGFYPSDIAVEWESNGQPENNYKTTPPVLDSDGSFFLYSKLTVDKSRWQQGNVFSCSVMHEALHNHYTQKSLSLSPGK

SEQ ID NO: 16702 - protein, 122 aa, Artificial Sequence; identical to SEQ ID NO: 11309
  Description of Artificial Sequence: Synthetic polypeptide
  VH of XENP018128

SEQ ID NO: 16703 - protein, 5 aa, Artificial Sequence
  Description of Artificial Sequence: Synthetic peptide
  XENP018128 vhCDR1
NWWMN

SEQ ID NO: 16704 - protein, 19 aa, Artificial Sequence
  Description of Artificial Sequence: Synthetic peptide
  XENP018128 vhCDR2
EIRLKSNNYATHYAEPVKG

SEQ ID NO: 16705 - protein, 11 aa, Artificial Sequence
  Description of Artificial Sequence: Synthetic peptide
  XENP018128 vhCDR3
YYGNYGGYFDV

SEQ ID NO: 16706 - protein, 214 aa, Artificial Sequence; identical to SEQ ID NO: 16226
  Description of Artificial Sequence: Synthetic polypeptide
  XENP018128 1G6_H1.31_L1_IgG1_PVA_/S267K Light Chain

SEQ ID NO: 16707 - protein, 107 aa, Artificial Sequence; identical to SEQ ID NO: 10923
  Description of Artificial Sequence: Synthetic polypeptide
  VL of XENP018128

SEQ ID NO: 16708 - protein, 11 aa, Artificial Sequence
  Description of Artificial Sequence: Synthetic peptide
  XENP018128 vlCDR1
RASQSVSNDVA

SEQ ID NO: 16709 - protein, 7 aa, Artificial Sequence
  Description of Artificial Sequence: Synthetic peptide
  XENP018128 vlCDR2
YASHRYT

SEQ ID NO: 16710 - protein, 9 aa, Artificial Sequence
  Description of Artificial Sequence: Synthetic peptide
  XENP018128 vlCDR3
QQDYSSPRT

SEQ ID NO: 16711 - protein, 451 aa, Artificial Sequence
  Description of Artificial Sequence: Synthetic polypeptide
  XENP018129 1G6_H1.32_L1_IgG1_PVA_/S267K Heavy Chain
EVQLVESGGGLVKPGGSLRLSCAASGFTFSNVWMNWVRQAPGKGLEWVGEIRLKSNNYATHYAEPVKGRFTISRDDSKSTVYLQMNSLKTEDTAVYYCTRYYGNYGGYFDVWGAGTLVTVSSASTKGPSVFPLAPSSKSTSGGTAALGCLVKDYFPEPVTVSWNSGALTSGVHTFPAVLQSSGLYSLSSVVTVPSSSLGTQTYICNVNHKPSNTKVDKKVEPKSCDKTHTCPPCPAPPVAGPSVFLFPPKPKDTLMISRTPEVTCVVVDVKHEDPEVKFNWYVDGVEVHNAKTKPREEQYNSTYRVVSVLTVLHQDWLNGKEYKCKVSNKALPAPIEKTISKAKGQPREPQVYTLPPSREEMTKNQVSLTCLVKGFYPSDIAVEWESNGQPENNYKTTPPVLDSDGSFFLYSKLTVDKSRWQQGNVFSCSVMHEALHNHYTQKSLSLSPGK

SEQ ID NO: 16712 - protein, 122 aa, Artificial Sequence; identical to SEQ ID NO: 11318
  Description of Artificial Sequence: Synthetic polypeptide
  VH of XENP018129

SEQ ID NO: 16713 - protein, 5 aa, Artificial Sequence
  Description of Artificial Sequence: Synthetic peptide
  XENP018129 vhCDR1
NVWMN

SEQ ID NO: 16714 - protein, 19 aa, Artificial Sequence
  Description of Artificial Sequence: Synthetic peptide
  XENP018129 vhCDR2
EIRLKSNNYATHYAEPVKG

SEQ ID NO: 16715 - protein, 11 aa, Artificial Sequence
  Description of Artificial Sequence: Synthetic peptide
  XENP018129 vhCDR3
YYGNYGGYFDV

SEQ ID NO: 16716 - protein, 214 aa, Artificial Sequence; identical to SEQ ID NO: 16226
  Description of Artificial Sequence: Synthetic polypeptide
  XENP018129 1G6_H1.32_L1_IgG1_PVA_/S267K Light Chain

SEQ ID NO: 16717 - protein, 107 aa, Artificial Sequence; identical to SEQ ID NO: 10923
  Description of Artificial Sequence: Synthetic polypeptide
  VL of XENP018129

SEQ ID NO: 16718 - protein, 11 aa, Artificial Sequence
  Description of Artificial Sequence: Synthetic peptide
  XENP018129 vlCDR1
RASQSVSNDVA

SEQ ID NO: 16719 - protein, 7 aa, Artificial Sequence
  Description of Artificial Sequence: Synthetic peptide
  XENP018129 vlCDR2
YASHRYT

SEQ ID NO: 16720 - protein, 9 aa, Artificial Sequence
  Description of Artificial Sequence: Synthetic peptide
  XENP018129 vlCDR3
QQDYSSPRT

SEQ ID NO: 16721 - protein, 451 aa, Artificial Sequence
  Description of Artificial Sequence: Synthetic polypeptide
  XENP018130 1G6_H1.33_L1_IgG1_PVA_/S267K Heavy Chain
EVQLVESGGGLVKPGGSLRLSCAASGFTFSNAWMNWVRQAPGKGLEWVGEIRLKSNNYATHYAEPVKGRFTISRDDSKSTVYLQMNSLKTEDTAVYYCTRYYGNYGGYFDVWGAGTLVTVSSASTKGPSVFPLAPSSKSTSGGTAALGCLVKDYFPEPVTVSWNSGALTSGVHTFPAVLQSSGLYSLSSVVTVPSSSLGTQTYICNVNHKPSNTKVDKKVEPKSCDKTHTCPPCPAPPVAGPSVFLFPPKPKDTLMISRTPEVTCVVVDVKHEDPEVKFNWYVDGVEVHNAKTKPREEQYNSTYRVVSVLTVLHQDWLNGKEYKCKVSNKALPAPIEKTISKAKGQPREPQVYTLPPSREEMTKNQVSLTCLVKGFYPSDIAVEWESNGQPENNYKTTPPVLDSDGSFFLYSKLTVDKSRWQQGNVFSCSVMHEALHNHYTQKSLSLSPGK

SEQ ID NO: 16722 - protein, 122 aa, Artificial Sequence; identical to SEQ ID NO: 11327
  Description of Artificial Sequence: Synthetic polypeptide
  VH of XENP018130

SEQ ID NO: 16723 - protein, 5 aa, Artificial Sequence
  Description of Artificial Sequence: Synthetic peptide
  XENP018130 vhCDR1
NAWMN

SEQ ID NO: 16724 - protein, 19 aa, Artificial Sequence
  Description of Artificial Sequence: Synthetic peptide
  XENP018130 vhCDR2
EIRLKSNNYATHYAEPVKG

SEQ ID NO: 16725 - protein, 11 aa, Artificial Sequence
  Description of Artificial Sequence: Synthetic peptide
  XENP018130 vhCDR3
YYGNYGGYFDV

SEQ ID NO: 16726 - protein, 214 aa, Artificial Sequence; identical to SEQ ID NO: 16226
  Description of Artificial Sequence: Synthetic polypeptide
  XENP018130 1G6_H1.33_L1_IgG1_PVA_/S267K Light Chain

SEQ ID NO: 16727 - protein, 107 aa, Artificial Sequence; identical to SEQ ID NO: 10923
  Description of Artificial Sequence: Synthetic polypeptide
  VL of XENP018130

SEQ ID NO: 16728 - protein, 11 aa, Artificial Sequence
  Description of Artificial Sequence: Synthetic peptide
  XENP018130 vlCDR1
RASQSVSNDVA

SEQ ID NO: 16729 - protein, 7 aa, Artificial Sequence
  Description of Artificial Sequence: Synthetic peptide
  XENP018130 vlCDR2
YASHRYT

SEQ ID NO: 16730 - protein, 9 aa, Artificial Sequence
  Description of Artificial Sequence: Synthetic peptide
  XENP018130 vlCDR3
QQDYSSPRT

SEQ ID NO: 16731 - protein, 451 aa, Artificial Sequence
  Description of Artificial Sequence: Synthetic polypeptide
  XENP018131 1G6_H1.34_L1_IgG1_PVA_/S267K Heavy Chain
EVQLVESGGGLVKPGGSLRLSCAASGFTFSNQWMNWVRQAPGKGLEWVGEIRLKSNNYATHYAEPVKGRFTISRDDSKSTVYLQMNSLKTEDTAVYYCTRYYGNYGGYFDVWGAGTLVTVSSASTKGPSVFPLAPSSKSTSGGTAALGCLVKDYFPEPVTVSWNSGALTSGVHTFPAVLQSSGLYSLSSVVTVPSSSLGTQTYICNVNHKPSNTKVDKKVEPKSCDKTHTCPPCPAPPVAGPSVFLFPPKPKDTLMISRTPEVTCVVVDVKHEDPEVKFNWYVDGVEVHNAKTKPREEQYNSTYRVVSVLTVLHQDWLNGKEYKCKVSNKALPAPIEKTISKAKGQPREPQVYTLPPSREEMTKNQVSLTCLVKGFYPSDIAVEWESNGQPENNYKTTPPVLDSDGSFFLYSKLTVDKSRWQQGNVFSCSVMHEALHNHYTQKSLSLSPGK

SEQ ID NO: 16732 - protein, 122 aa, Artificial Sequence; identical to SEQ ID NO: 11336
  Description of Artificial Sequence: Synthetic polypeptide
  VH of XENP018131

SEQ ID NO: 16733 - protein, 5 aa, Artificial Sequence
  Description of Artificial Sequence: Synthetic peptide
  XENP018131 vhCDR1
NQWMN

SEQ ID NO: 16734 - protein, 19 aa, Artificial Sequence
  Description of Artificial Sequence: Synthetic peptide
  XENP018131 vhCDR2
EIRLKSNNYATHYAEPVKG

SEQ ID NO: 16735 - protein, 11 aa, Artificial Sequence
  Description of Artificial Sequence: Synthetic peptide
  XENP018131 vhCDR3
YYGNYGGYFDV

SEQ ID NO: 16736 - protein, 214 aa, Artificial Sequence; identical to SEQ ID NO: 16226
  Description of Artificial Sequence: Synthetic polypeptide
  XENP018131 1G6_H1.34_L1_IgG1_PVA_/S267K Light Chain

SEQ ID NO: 16737 - protein, 107 aa, Artificial Sequence; identical to SEQ ID NO: 10923
  Description of Artificial Sequence: Synthetic polypeptide
  VL of XENP018131

SEQ ID NO: 16738 - protein, 11 aa, Artificial Sequence
  Description of Artificial Sequence: Synthetic peptide
  XENP018131 vlCDR1
RASQSVSNDVA

SEQ ID NO: 16739 - protein, 7 aa, Artificial Sequence
  Description of Artificial Sequence: Synthetic peptide
  XENP018131 vlCDR2
YASHRYT

SEQ ID NO: 16740 - protein, 9 aa, Artificial Sequence
  Description of Artificial Sequence: Synthetic peptide
  XENP018131 vlCDR3
QQDYSSPRT

SEQ ID NO: 16741 - protein, 451 aa, Artificial Sequence
  Description of Artificial Sequence: Synthetic polypeptide
  XENP018132 1G6_H1.35_L1_IgG1_PVA_/S267K Heavy Chain
EVQLVESGGGLVKPGGSLRLSCAASGFTFSNDWMNWVRQAPGKGLEWVGEIRLKSNNYATHYAEPVKGRFTISRDDSKSTVYLQMNSLKTEDTAVYYCTRYYGNYGGYFDVWGAGTLVTVSSASTKGPSVFPLAPSSKSTSGGTAALGCLVKDYFPEPVTVSWNSGALTSGVHTFPAVLQSSGLYSLSSVVTVPSSSLGTQTYICNVNHKPSNTKVDKKVEPKSCDKTHTCPPCPAPPVAGPSVFLFPPKPKDTLMISRTPEVTCVVVDVKHEDPEVKFNWYVDGVEVHNAKTKPREEQYNSTYRVVSVLTVLHQDWLNGKEYKCKVSNKALPAPIEKTISKAKGQPREPQVYTLPPSREEMTKNQVSLTCLVKGFYPSDIAVEWESNGQPENNYKTTPPVLDSDGSFFLYSKLTVDKSRWQQGNVFSCSVMHEALHNHYTQKSLSLSPGK

SEQ ID NO: 16742 - protein, 122 aa, Artificial Sequence; identical to SEQ ID NO: 11345
  Description of Artificial Sequence: Synthetic polypeptide
  VH of XENP018132

SEQ ID NO: 16743 - protein, 5 aa, Artificial Sequence
  Description of Artificial Sequence: Synthetic peptide
  XENP018132 vhCDR1
NDWMN

SEQ ID NO: 16744 - protein, 19 aa, Artificial Sequence
  Description of Artificial Sequence: Synthetic peptide
  XENP018132 vhCDR2
EIRLKSNNYATHYAEPVKG

SEQ ID NO: 16745 - protein, 11 aa, Artificial Sequence
  Description of Artificial Sequence: Synthetic peptide
  XENP018132 vhCDR3
YYGNYGGYFDV

SEQ ID NO: 16746 - protein, 214 aa, Artificial Sequence; identical to SEQ ID NO: 16226
  Description of Artificial Sequence: Synthetic polypeptide
  XENP018132 1G6_H1.35_L1_IgG1_PVA_/S267K Light Chain

SEQ ID NO: 16747 - protein, 107 aa, Artificial Sequence; identical to SEQ ID NO: 10923
  Description of Artificial Sequence: Synthetic polypeptide
  VL of XENP018132

SEQ ID NO: 16748 - protein, 11 aa, Artificial Sequence
  Description of Artificial Sequence: Synthetic peptide
  XENP018132 vlCDR1
RASQSVSNDVA

SEQ ID NO: 16749 - protein, 7 aa, Artificial Sequence
  Description of Artificial Sequence: Synthetic peptide
  XENP018132 vlCDR2
YASHRYT

SEQ ID NO: 16750 - protein, 9 aa, Artificial Sequence
  Description of Artificial Sequence: Synthetic peptide
  XENP018132 vlCDR3
QQDYSSPRT

SEQ ID NO: 16751 - protein, 451 aa, Artificial Sequence
  Description of Artificial Sequence: Synthetic polypeptide
  XENP018133 1G6_H1.36_L1_IgG1_PVA_/S267K Heavy Chain
EVQLVESGGGLVKPGGSLRLSCAASGFTFSNKWMNWVRQAPGKGLEWVGEIRLKSNNYATHYAEPVKGRFTISRDDSKSTVYLQMNSLKTEDTAVYYCTRYYGNYGGYFDVWGAGTLVTVSSASTKGPSVFPLAPSSKSTSGGTAALGCLVKDYFPEPVTVSWNSGALTSGVHTFPAVLQSSGLYSLSSVVTVPSSSLGTQTYICNVNHKPSNTKVDKKVEPKSCDKTHTCPPCPAPPVAGPSVFLFPPKPKDTLMISRTPEVTCVVVDVKHEDPEVKFNWYVDGVEVHNAKTKPREEQYNSTYRVVSVLTVLHQDWLNGKEYKCKVSNKALPAPIEKTISKAKGQPREPQVYTLPPSREEMTKNQVSLTCLVKGFYPSDIAVEWESNGQPENNYKTTPPVLDSDGSFFLYSKLTVDKSRWQQGNVFSCSVMHEALHNHYTQKSLSLSPGK

SEQ ID NO: 16752 - protein, 122 aa, Artificial Sequence; identical to SEQ ID NO: 11354
  Description of Artificial Sequence: Synthetic polypeptide
  VH of XENP018133

SEQ ID NO: 16753 - protein, 5 aa, Artificial Sequence
  Description of Artificial Sequence: Synthetic peptide
  XENP018133 vhCDR1
NKWMN

SEQ ID NO: 16754 - protein, 19 aa, Artificial Sequence
  Description of Artificial Sequence: Synthetic peptide
  XENP018133 vhCDR2
EIRLKSNNYATHYAEPVKG

SEQ ID NO: 16755 - protein, 11 aa, Artificial Sequence
  Description of Artificial Sequence: Synthetic peptide
  XENP018133 vhCDR3
YYGNYGGYFDV

SEQ ID NO: 16756 - protein, 214 aa, Artificial Sequence; identical to SEQ ID NO: 16226
  Description of Artificial Sequence: Synthetic polypeptide
  XENP018133 1G6_H1.36_L1_IgG1_PVA_/S267K Light Chain

SEQ ID NO: 16757 - protein, 107 aa, Artificial Sequence; identical to SEQ ID NO: 10923
  Description of Artificial Sequence: Synthetic polypeptide
  VL of XENP018133

SEQ ID NO: 16758 - protein, 11 aa, Artificial Sequence
  Description of Artificial Sequence: Synthetic peptide
  XENP018133 vlCDR1
RASQSVSNDVA

SEQ ID NO: 16759 - protein, 7 aa, Artificial Sequence
  Description of Artificial Sequence: Synthetic peptide
  XENP018133 vlCDR2
YASHRYT

SEQ ID NO: 16760 - protein, 9 aa, Artificial Sequence
  Description of Artificial Sequence: Synthetic peptide
  XENP018133 vlCDR3
QQDYSSPRT

SEQ ID NO: 16761 - protein, 451 aa, Artificial Sequence
  Description of Artificial Sequence: Synthetic polypeptide
  XENP018134 1G6_H1.37_L1_IgG1_PVA_/S267K Heavy Chain
EVQLVESGGGLVKPGGSLRLSCAASGFTFSNYGMNWVRQAPGKGLEWVGEIRLKSNNYATHYAEPVKGRFTISRDDSKSTVYLQMNSLKTEDTAVYYCTRYYGNYGGYFDVWGAGTLVTVSSASTKGPSVFPLAPSSKSTSGGTAALGCLVKDYFPEPVTVSWNSGALTSGVHTFPAVLQSSGLYSLSSVVTVPSSSLGTQTYICNVNHKPSNTKVDKKVEPKSCDKTHTCPPCPAPPVAGPSVFLFPPKPKDTLMISRTPEVTCVVVDVKHEDPEVKFNWYVDGVEVHNAKTKPREEQYNSTYRVVSVLTVLHQDWLNGKEYKCKVSNKALPAPIEKTISKAKGQPREPQVYTLPPSREEMTKNQVSLTCLVKGFYPSDIAVEWESNGQPENNYKTTPPVLDSDGSFFLYSKLTVDKSRWQQGNVFSCSVMHEALHNHYTQKSLSLSPGK

SEQ ID NO: 16762 - protein, 122 aa, Artificial Sequence; identical to SEQ ID NO: 11363
  Description of Artificial Sequence: Synthetic polypeptide
  VH of XENP018134

SEQ ID NO: 16763 - protein, 5 aa, Artificial Sequence
  Description of Artificial Sequence: Synthetic peptide
  XENP018134 vhCDR1
NYGMN

SEQ ID NO: 16764 - protein, 19 aa, Artificial Sequence
  Description of Artificial Sequence: Synthetic peptide
  XENP018134 vhCDR2
EIRLKSNNYATHYAEPVKG

SEQ ID NO: 16765 - protein, 11 aa, Artificial Sequence
  Description of Artificial Sequence: Synthetic peptide
  XENP018134 vhCDR3
YYGNYGGYFDV

SEQ ID NO: 16766 - protein, 214 aa, Artificial Sequence; identical to SEQ ID NO: 16226
  Description of Artificial Sequence: Synthetic polypeptide
  XENP018134 1G6_H1.37_L1_IgG1_PVA_/S267K Light Chain

SEQ ID NO: 16767 - protein, 107 aa, Artificial Sequence; identical to SEQ ID NO: 10923
  Description of Artificial Sequence: Synthetic polypeptide
  VL of XENP018134

SEQ ID NO: 16768 - protein, 11 aa, Artificial Sequence
  Description of Artificial Sequence: Synthetic peptide
  XENP018134 vlCDR1
RASQSVSNDVA

SEQ ID NO: 16769 - protein, 7 aa, Artificial Sequence
  Description of Artificial Sequence: Synthetic peptide
  XENP018134 vlCDR2
YASHRYT

SEQ ID NO: 16770 - protein, 9 aa, Artificial Sequence
  Description of Artificial Sequence: Synthetic peptide
  XENP018134 vlCDR3
QQDYSSPRT

SEQ ID NO: 16771 - protein, 451 aa, Artificial Sequence
  Description of Artificial Sequence: Synthetic polypeptide
  XENP018135 1G6_H1.38_L1_IgG1_PVA_/S267K Heavy Chain
EVQLVESGGGLVKPGGSLRLSCAASGFTFSNYAMNWVRQAPGKGLEWVGEIRLKSNNYATHYAEPVKGRFTISRDDSKSTVYLQMNSLKTEDTAVYYCTRYYGNYGGYFDVWGAGTLVTVSSASTKGPSVFPLAPSSKSTSGGTAALGCLVKDYFPEPVTVSWNSGALTSGVHTFPAVLQSSGLYSLSSVVTVPSSSLGTQTYICNVNHKPSNTKVDKKVEPKSCDKTHTCPPCPAPPVAGPSVFLFPPKPKDTLMISRTPEVTCVVVDVKHEDPEVKFNWYVDGVEVHNAKTKPREEQYNSTYRVVSVLTVLHQDWLNGKEYKCKVSNKALPAPIEKTISKAKGQPREPQVYTLPPSREEMTKNQVSLTCLVKGFYPSDIAVEWESNGQPENNYKTTPPVLDSDGSFFLYSKLTVDKSRWQQGNVFSCSVMHEALHNHYTQKSLSLSPGK

SEQ ID NO: 16772 - protein, 122 aa, Artificial Sequence; identical to SEQ ID NO: 11372
  Description of Artificial Sequence: Synthetic polypeptide
  VH of XENP018135

SEQ ID NO: 16773 - protein, 5 aa, Artificial Sequence
  Description of Artificial Sequence: Synthetic peptide
  XENP018135 vhCDR1
NYAMN

SEQ ID NO: 16774 - protein, 19 aa, Artificial Sequence
  Description of Artificial Sequence: Synthetic peptide
  XENP018135 vhCDR2
EIRLKSNNYATHYAEPVKG

SEQ ID NO: 16775 - protein, 11 aa, Artificial Sequence
  Description of Artificial Sequence: Synthetic peptide
  XENP018135 vhCDR3
YYGNYGGYFDV

SEQ ID NO: 16776 - protein, 214 aa, Artificial Sequence; identical to SEQ ID NO: 16226
  Description of Artificial Sequence: Synthetic polypeptide
  XENP018135 1G6_H1.38_L1_IgG1_PVA_/S267K Light Chain

SEQ ID NO: 16777 - protein, 107 aa, Artificial Sequence; identical to SEQ ID NO: 10923
  Description of Artificial Sequence: Synthetic polypeptide
  VL of XENP018135

SEQ ID NO: 16778 - protein, 11 aa, Artificial Sequence
  Description of Artificial Sequence: Synthetic peptide
  XENP018135 vlCDR1
RASQSVSNDVA

SEQ ID NO: 16779 - protein, 7 aa, Artificial Sequence
  Description of Artificial Sequence: Synthetic peptide
  XENP018135 vlCDR2
YASHRYT

SEQ ID NO: 16780 - protein, 9 aa, Artificial Sequence
  Description of Artificial Sequence: Synthetic peptide
  XENP018135 vlCDR3
QQDYSSPRT

SEQ ID NO: 16781 - protein, 451 aa, Artificial Sequence
  Description of Artificial Sequence: Synthetic polypeptide
  XENP018136 1G6_H1.39_L1_IgG1_PVA_/S267K Heavy Chain
EVQLVESGGGLVKPGGSLRLSCAASGFTFSNYYMNWVRQAPGKGLEWVGEIRLKSNNYATHYAEPVKGRFTISRDDSKSTVYLQMNSLKTEDTAVYYCTRYYGNYGGYFDVWGAGTLVTVSSASTKGPSVFPLAPSSKSTSGGTAALGCLVKDYFPEPVTVSWNSGALTSGVHTFPAVLQSSGLYSLSSVVTVPSSSLGTQTYICNVNHKPSNTKVDKKVEPKSCDKTHTCPPCPAPPVAGPSVFLFPPKPKDTLMISRTPEVTCVVVDVKHEDPEVKFNWYVDGVEVHNAKTKPREEQYNSTYRVVSVLTVLHQDWLNGKEYKCKVSNKALPAPIEKTISKAKGQPREPQVYTLPPSREEMTKNQVSLTCLVKGFYPSDIAVEWESNGQPENNYKTTPPVLDSDGSFFLYSKLTVDKSRWQQGNVFSCSVMHEALHNHYTQKSLSLSPGK

SEQ ID NO: 16782 - protein, 122 aa, Artificial Sequence; identical to SEQ ID NO: 11381
  Description of Artificial Sequence: Synthetic polypeptide
  VH of XENP018136

SEQ ID NO: 16783 - protein, 5 aa, Artificial Sequence
  Description of Artificial Sequence: Synthetic peptide
  XENP018136 vhCDR1
NYYMN

SEQ ID NO: 16784 - protein, 19 aa, Artificial Sequence
  Description of Artificial Sequence: Synthetic peptide
  XENP018136 vhCDR2
EIRLKSNNYATHYAEPVKG

SEQ ID NO: 16785 - protein, 11 aa, Artificial Sequence
  Description of Artificial Sequence: Synthetic peptide
  XENP018136 vhCDR3
YYGNYGGYFDV

SEQ ID NO: 16786 - protein, 214 aa, Artificial Sequence; identical to SEQ ID NO: 16226
  Description of Artificial Sequence: Synthetic polypeptide
  XENP018136 1G6_H1.39_L1_IgG1_PVA_/S267K Light Chain

SEQ ID NO: 16787 - protein, 107 aa, Artificial Sequence; identical to SEQ ID NO: 10923
  Description of Artificial Sequence: Synthetic polypeptide
  VL of XENP018136

SEQ ID NO: 16788 - protein, 11 aa, Artificial Sequence
  Description of Artificial Sequence: Synthetic peptide
  XENP018136 vlCDR1
RASQSVSNDVA

SEQ ID NO: 16789 - protein, 7 aa, Artificial Sequence
  Description of Artificial Sequence: Synthetic peptide
  XENP018136 vlCDR2
YASHRYT

SEQ ID NO: 16790 - protein, 9 aa, Artificial Sequence
  Description of Artificial Sequence: Synthetic peptide
  XENP018136 vlCDR3
QQDYSSPRT

SEQ ID NO: 16791 - protein, 451 aa, Artificial Sequence
  Description of Artificial Sequence: Synthetic polypeptide
  XENP018137 1G6_H1.40_L1_IgG1_PVA_/S267K Heavy Chain
EVQLVESGGGLVKPGGSLRLSCAASGFTFSNYDMNWVRQAPGKGLEWVGEIRLKSNNYATHYAEPVKGRFTISRDDSKSTVYLQMNSLKTEDTAVYYCTRYYGNYGGYFDVWGAGTLVTVSSASTKGPSVFPLAPSSKSTSGGTAALGCLVKDYFPEPVTVSWNSGALTSGVHTFPAVLQSSGLYSLSSVVTVPSSSLGTQTYICNVNHKPSNTKVDKKVEPKSCDKTHTCPPCPAPPVAGPSVFLFPPKPKDTLMISRTPEVTCVVVDVKHEDPEVKFNWYVDGVEVHNAKTKPREEQYNSTYRVVSVLTVLHQDWLNGKEYKCKVSNKALPAPIEKTISKAKGQPREPQVYTLPPSREEMTKNQVSLTCLVKGFYPSDIAVEWESNGQPENNYKTTPPVLDSDGSFFLYSKLTVDKSRWQQGNVFSCSVMHEALHNHYTQKSLSLSPGK

SEQ ID NO: 16792 - protein, 122 aa, Artificial Sequence; identical to SEQ ID NO: 11390
  Description of Artificial Sequence: Synthetic polypeptide
  VH of XENP018137

SEQ ID NO: 16793 - protein, 5 aa, Artificial Sequence
  Description of Artificial Sequence: Synthetic peptide
  XENP018137 vhCDR1
NYDMN

SEQ ID NO: 16794 - protein, 19 aa, Artificial Sequence
  Description of Artificial Sequence: Synthetic peptide
  XENP018137 vhCDR2
EIRLKSNNYATHYAEPVKG

SEQ ID NO: 16795 - protein, 11 aa, Artificial Sequence
  Description of Artificial Sequence: Synthetic peptide
  XENP018137 vhCDR3
YYGNYGGYFDV

SEQ ID NO: 16796 - protein, 214 aa, Artificial Sequence; identical to SEQ ID NO: 16226
  Description of Artificial Sequence: Synthetic polypeptide
  XENP018137 1G6_H1.40_L1_IgG1_PVA_/S267K Light Chain

SEQ ID NO: 16797 - protein, 107 aa, Artificial Sequence; identical to SEQ ID NO: 10923
  Description of Artificial Sequence: Synthetic polypeptide
  VL of XENP018137

SEQ ID NO: 16798 - protein, 11 aa, Artificial Sequence
  Description of Artificial Sequence: Synthetic peptide
  XENP018137 vlCDR1
RASQSVSNDVA

SEQ ID NO: 16799 - protein, 7 aa, Artificial Sequence
  Description of Artificial Sequence: Synthetic peptide
  XENP018137 vlCDR2
YASHRYT

SEQ ID NO: 16800 - protein, 9 aa, Artificial Sequence
  Description of Artificial Sequence: Synthetic peptide
  XENP018137 vlCDR3
QQDYSSPRT

SEQ ID NO: 16801 - protein, 451 aa, Artificial Sequence
  Description of Artificial Sequence: Synthetic polypeptide
  XENP018138 1G6_H1.41_L1_IgG1_PVA_/S267K Heavy Chain
EVQLVESGGGLVKPGGSLRLSCAASGFTFSNYWMSWVRQAPGKGLEWVGEIRLKSNNYATHYAEPVKGRFTISRDDSKSTVYLQMNSLKTEDTAVYYCTRYYGNYGGYFDVWGAGTLVTVSSASTKGPSVFPLAPSSKSTSGGTAALGCLVKDYFPEPVTVSWNSGALTSGVHTFPAVLQSSGLYSLSSVVTVPSSSLGTQTYICNVNHKPSNTKVDKKVEPKSCDKTHTCPPCPAPPVAGPSVFLFPPKPKDTLMISRTPEVTCVVVDVKHEDPEVKFNWYVDGVEVHNAKTKPREEQYNSTYRVVSVLTVLHQDWLNGKEYKCKVSNKALPAPIEKTISKAKGQPREPQVYTLPPSREEMTKNQVSLTCLVKGFYPSDIAVEWESNGQPENNYKTTPPVLDSDGSFFLYSKLTVDKSRWQQGNVFSCSVMHEALHNHYTQKSLSLSPGK

SEQ ID NO: 16802 - protein, 122 aa, Artificial Sequence; identical to SEQ ID NO: 11399
  Description of Artificial Sequence: Synthetic polypeptide
  VH of XENP018138

SEQ ID NO: 16803 - protein, 5 aa, Artificial Sequence
  Description of Artificial Sequence: Synthetic peptide
  XENP018138 vhCDR1
NYWMS

SEQ ID NO: 16804 - protein, 19 aa, Artificial Sequence
  Description of Artificial Sequence: Synthetic peptide
  XENP018138 vhCDR2
EIRLKSNNYATHYAEPVKG

SEQ ID NO: 16805 - protein, 11 aa, Artificial Sequence
  Description of Artificial Sequence: Synthetic peptide
  XENP018138 vhCDR3
YYGNYGGYFDV

SEQ ID NO: 16806 - protein, 214 aa, Artificial Sequence; identical to SEQ ID NO: 16226
  Description of Artificial Sequence: Synthetic polypeptide
  XENP018138 1G6_H1.41_L1_IgG1_PVA_/S267K Light Chain

SEQ ID NO: 16807 - protein, 107 aa, Artificial Sequence; identical to SEQ ID NO: 10923
  Description of Artificial Sequence: Synthetic polypeptide
  VL of XENP018138

SEQ ID NO: 16808 - protein, 11 aa, Artificial Sequence
  Description of Artificial Sequence: Synthetic peptide
  XENP018138 vlCDR1
RASQSVSNDVA

SEQ ID NO: 16809 - protein, 7 aa, Artificial Sequence
  Description of Artificial Sequence: Synthetic peptide
  XENP018138 vlCDR2
YASHRYT

SEQ ID NO: 16810 - protein, 9 aa, Artificial Sequence
  Description of Artificial Sequence: Synthetic peptide
  XENP018138 vlCDR3
QQDYSSPRT

SEQ ID NO: 16811 - protein, 451 aa, Artificial Sequence
  Description of Artificial Sequence: Synthetic polypeptide
  XENP018139 1G6_H1.42_L1_IgG1_PVA_/S267K Heavy Chain
EVQLVESGGGLVKPGGSLRLSCAASGFTFSNYWMHWVRQAPGKGLEWVGEIRLKSNNYATHYAEPVKGRFTISRDDSKSTVYLQMNSLKTEDTAVYYCTRYYGNYGGYFDVWGAGTLVTVSSASTKGPSVFPLAPSSKSTSGGTAALGCLVKDYFPEPVTVSWNSGALTSGVHTFPAVLQSSGLYSLSSVVTVPSSSLGTQTYICNVNHKPSNTKVDKKVEPKSCDKTHTCPPCPAPPVAGPSVFLFPPKPKDTLMISRTPEVTCVVVDVKHEDPEVKFNWYVDGVEVHNAKTKPREEQYNSTYRVVSVLTVLHQDWLNGKEYKCKVSNKALPAPIEKTISKAKGQPREPQVYTLPPSREEMTKNQVSLTCLVKGFYPSDIAVEWESNGQPENNYKTTPPVLDSDGSFFLYSKLTVDKSRWQQGNVFSCSVMHEALHNHYTQKSLSLSPGK

SEQ ID NO: 16812 - protein, 122 aa, Artificial Sequence; identical to SEQ ID NO: 11408
  Description of Artificial Sequence: Synthetic polypeptide
  VH of XENP018139

SEQ ID NO: 16813 - protein, 5 aa, Artificial Sequence
  Description of Artificial Sequence: Synthetic peptide
  XENP018139 vhCDR1
NYWMH

SEQ ID NO: 16814 - protein, 19 aa, Artificial Sequence
  Description of Artificial Sequence: Synthetic peptide
  XENP018139 vhCDR2
EIRLKSNNYATHYAEPVKG

SEQ ID NO: 16815 - protein, 11 aa, Artificial Sequence
  Description of Artificial Sequence: Synthetic peptide
  XENP018139 vhCDR3
YYGNYGGYFDV

SEQ ID NO: 16816 - protein, 214 aa, Artificial Sequence; identical to SEQ ID NO: 16226
  Description of Artificial Sequence: Synthetic polypeptide
  XENP018139 1G6_H1.42_L1_IgG1_PVA_/S267K Light Chain

SEQ ID NO: 16817 - protein, 107 aa, Artificial Sequence; identical to SEQ ID NO: 10923
  Description of Artificial Sequence: Synthetic polypeptide
  VL of XENP018139

SEQ ID NO: 16818 - protein, 11 aa, Artificial Sequence
  Description of Artificial Sequence: Synthetic peptide
  XENP018139 vlCDR1
RASQSVSNDVA

SEQ ID NO: 16819 - protein, 7 aa, Artificial Sequence
  Description of Artificial Sequence: Synthetic peptide
  XENP018139 vlCDR2
YASHRYT

SEQ ID NO: 16820 - protein, 9 aa, Artificial Sequence
  Description of Artificial Sequence: Synthetic peptide
  XENP018139 vlCDR3
QQDYSSPRT

SEQ ID NO: 16821 - protein, 451 aa, Artificial Sequence
  Description of Artificial Sequence: Synthetic polypeptide
  XENP018140 1G6_H1.43_L1_IgG1_PVA_/S267K Heavy Chain
EVQLVESGGGLVKPGGSLRLSCAASGFTFSNYWMDWVRQAPGKGLEWVGEIRLKSNNYATHYAEPVKGRFTISRDDSKSTVYLQMNSLKTEDTAVYYCTRYYGNYGGYFDVWGAGTLVTVSSASTKGPSVFPLAPSSKSTSGGTAALGCLVKDYFPEPVTVSWNSGALTSGVHTFPAVLQSSGLYSLSSVVTVPSSSLGTQTYICNVNHKPSNTKVDKKVEPKSCDKTHTCPPCPAPPVAGPSVFLFPPKPKDTLMISRTPEVTCVVVDVKHEDPEVKFNWYVDGVEVHNAKTKPREEQYNSTYRVVSVLTVLHQDWLNGKEYKCKVSNKALPAPIEKTISKAKGQPREPQVYTLPPSREEMTKNQVSLTCLVKGFYPSDIAVEWESNGQPENNYKTTPPVLDSDGSFFLYSKLTVDKSRWQQGNVFSCSVMHEALHNHYTQKSLSLSPGK

SEQ ID NO: 16822 - protein, 122 aa, Artificial Sequence; identical to SEQ ID NO: 11417
  Description of Artificial Sequence: Synthetic polypeptide
  VH of XENP018140

SEQ ID NO: 16823 - protein, 5 aa, Artificial Sequence
  Description of Artificial Sequence: Synthetic peptide
  XENP018140 vhCDR1
NYWMD

SEQ ID NO: 16824 - protein, 19 aa, Artificial Sequence
  Description of Artificial Sequence: Synthetic peptide
  XENP018140 vhCDR2
EIRLKSNNYATHYAEPVKG

SEQ ID NO: 16825 - protein, 11 aa, Artificial Sequence
  Description of Artificial Sequence: Synthetic peptide
  XENP018140 vhCDR3
YYGNYGGYFDV

SEQ ID NO: 16826 - protein, 214 aa, Artificial Sequence; identical to SEQ ID NO: 16226
  Description of Artificial Sequence: Synthetic polypeptide
  XENP018140 1G6_H1.43_L1_IgG1_PVA_/S267K Light Chain

SEQ ID NO: 16827 - protein, 107 aa, Artificial Sequence; identical to SEQ ID NO: 10923
  Description of Artificial Sequence: Synthetic polypeptide
  VL of XENP018140

SEQ ID NO: 16828 - protein, 11 aa, Artificial Sequence
  Description of Artificial Sequence: Synthetic peptide
  XENP018140 vlCDR1
RASQSVSNDVA

SEQ ID NO: 16829 - protein, 7 aa, Artificial Sequence
  Description of Artificial Sequence: Synthetic peptide
  XENP018140 vlCDR2
YASHRYT

SEQ ID NO: 16830 - protein, 9 aa, Artificial Sequence
  Description of Artificial Sequence: Synthetic peptide
  XENP018140 vlCDR3
QQDYSSPRT

SEQ ID NO: 16831 - protein, 451 aa, Artificial Sequence
  Description of Artificial Sequence: Synthetic polypeptide
  XENP018141 1G6_H1.44_L1_IgG1_PVA_/S267K Heavy Chain
EVQLVESGGGLVKPGGSLRLSCAASGFTFSNYWMGWVRQAPGKGLEWVGEIRLKSNNYATHYAEPVKGRFTISRDDSKSTVYLQMNSLKTEDTAVYYCTRYYGNYGGYFDVWGAGTLVTVSSASTKGPSVFPLAPSSKSTSGGTAALGCLVKDYFPEPVTVSWNSGALTSGVHTFPAVLQSSGLYSLSSVVTVPSSSLGTQTYICNVNHKPSNTKVDKKVEPKSCDKTHTCPPCPAPPVAGPSVFLFPPKPKDTLMISRTPEVTCVVVDVKHEDPEVKFNWYVDGVEVHNAKTKPREEQYNSTYRVVSVLTVLHQDWLNGKEYKCKVSNKALPAPIEKTISKAKGQPREPQVYTLPPSREEMTKNQVSLTCLVKGFYPSDIAVEWESNGQPENNYKTTPPVLDSDGSFFLYSKLTVDKSRWQQGNVFSCSVMHEALHNHYTQKSLSLSPGK

SEQ ID NO: 16832 - protein, 122 aa, Artificial Sequence; identical to SEQ ID NO: 11426
  Description of Artificial Sequence: Synthetic polypeptide
  VH of XENP018141

SEQ ID NO: 16833 - protein, 5 aa, Artificial Sequence
  Description of Artificial Sequence: Synthetic peptide
  XENP018141 vhCDR1
NYWMG

SEQ ID NO: 16834 - protein, 18 aa, Artificial Sequence
  Description of Artificial Sequence: Synthetic peptide
  XENP018141 vhCDR2
EIRLKSNNYATHYAEPVK

SEQ ID NO: 16835 - protein, 11 aa, Artificial Sequence
  Description of Artificial Sequence: Synthetic peptide
  XENP018141 vhCDR3
YYGNYGGYFDV

SEQ ID NO: 16836 - protein, 214 aa, Artificial Sequence; identical to SEQ ID NO: 16226
  Description of Artificial Sequence: Synthetic polypeptide
  XENP018141 1G6_H1.44_L1_IgG1_PVA_/S267K Light Chain

SEQ ID NO: 16837 - protein, 107 aa, Artificial Sequence; identical to SEQ ID NO: 10923
  Description of Artificial Sequence: Synthetic polypeptide
  VL of XENP018141

SEQ ID NO: 16838 - protein, 11 aa, Artificial Sequence
  Description of Artificial Sequence: Synthetic peptide
  XENP018141 vlCDR1
RASQSVSNDVA

SEQ ID NO: 16839 - protein, 7 aa, Artificial Sequence
  Description of Artificial Sequence: Synthetic peptide
  XENP018141 vlCDR2
YASHRYT

SEQ ID NO: 16840 - protein, 9 aa, Artificial Sequence
  Description of Artificial Sequence: Synthetic peptide
  XENP018141 vlCDR3
QQDYSSPRT

SEQ ID NO: 16841 - protein, 451 aa, Artificial Sequence
  Description of Artificial Sequence: Synthetic polypeptide
  XENP018142 1G6_H1.45_L1_IgG1_PVA_/S267K Heavy Chain
EVQLVESGGGLVKPGGSLRLSCAASGFTFSNYWMNWARQAPGKGLEWVGEIRLKSNNYATHYAEPVKGRFTISRDDSKSTVYLQMNSLKTEDTAVYYCTRYYGNYGGYFDVWGAGTLVTVSSASTKGPSVFPLAPSSKSTSGGTAALGCLVKDYFPEPVTVSWNSGALTSGVHTFPAVLQSSGLYSLSSVVTVPSSSLGTQTYICNVNHKPSNTKVDKKVEPKSCDKTHTCPPCPAPPVAGPSVFLFPPKPKDTLMISRTPEVTCVVVDVKHEDPEVKFNWYVDGVEVHNAKTKPREEQYNSTYRVVSVLTVLHQDWLNGKEYKCKVSNKALPAPIEKTISKAKGQPREPQVYTLPPSREEMTKNQVSLTCLVKGFYPSDIAVEWESNGQPENNYKTTPPVLDSDGSFFLYSKLTVDKSRWQQGNVFSCSVMHEALHNHYTQKSLSLSPGK

SEQ ID NO: 16842 - protein, 122 aa, Artificial Sequence; identical to SEQ ID NO: 11435
  Description of Artificial Sequence: Synthetic polypeptide
  VH of XENP018142

SEQ ID NO: 16843 - protein, 5 aa, Artificial Sequence
  Description of Artificial Sequence: Synthetic peptide
  XENP018142 vhCDR1
NYWMN

SEQ ID NO: 16844 - protein, 19 aa, Artificial Sequence
  Description of Artificial Sequence: Synthetic peptide
  XENP018142 vhCDR2
EIRLKSNNYATHYAEPVKG

SEQ ID NO: 16845 - protein, 11 aa, Artificial Sequence
  Description of Artificial Sequence: Synthetic peptide
  XENP018142 vhCDR3
YYGNYGGYFDV

SEQ ID NO: 16846 - protein, 214 aa, Artificial Sequence; identical to SEQ ID NO: 16226
  Description of Artificial Sequence: Synthetic polypeptide
  XENP018142 1G6_H1.45_L1_IgG1_PVA_/S267K Light Chain

SEQ ID NO: 16847 - protein, 107 aa, Artificial Sequence; identical to SEQ ID NO: 10923
  Description of Artificial Sequence: Synthetic polypeptide
  VL of XENP018142

SEQ ID NO: 16848 - protein, 11 aa, Artificial Sequence
  Description of Artificial Sequence: Synthetic peptide
  XENP018142 vlCDR1
RASQSVSNDVA

SEQ ID NO: 16849 - protein, 7 aa, Artificial Sequence
  Description of Artificial Sequence: Synthetic peptide
  XENP018142 vlCDR2
YASHRYT

SEQ ID NO: 16850 - protein, 9 aa, Artificial Sequence
  Description of Artificial Sequence: Synthetic peptide
  XENP018142 vlCDR3
QQDYSSPRT

SEQ ID NO: 16851 - protein, 451 aa, Artificial Sequence
  Description of Artificial Sequence: Synthetic polypeptide
  XENP018143 1G6_H1.46_L1_IgG1_PVA_/S267K Heavy Chain
EVQLVESGGGLVKPGGSLRLSCAASGFTFSNYWMNWIRQAPGKGLEWVGEIRLKSNNYATHYAEPVKGRFTISRDDSKSTVYLQMNSLKTEDTAVYYCTRYYGNYGGYFDVWGAGTLVTVSSASTKGPSVFPLAPSSKSTSGGTAALGCLVKDYFPEPVTVSWNSGALTSGVHTFPAVLQSSGLYSLSSVVTVPSSSLGTQTYICNVNHKPSNTKVDKKVEPKSCDKTHTCPPCPAPPVAGPSVFLFPPKPKDTLMISRTPEVTCVVVDVKHEDPEVKFNWYVDGVEVHNAKTKPREEQYNSTYRVVSVLTVLHQDWLNGKEYKCKVSNKALPAPIEKTISKAKGQPREPQVYTLPPSREEMTKNQVSLTCLVKGFYPSDIAVEWESNGQPENNYKTTPPVLDSDGSFFLYSKLTVDKSRWQQGNVFSCSVMHEALHNHYTQKSLSLSPGK

SEQ ID NO: 16852 - protein, 122 aa, Artificial Sequence; identical to SEQ ID NO: 11444
  Description of Artificial Sequence: Synthetic polypeptide
  VH of XENP018143

SEQ ID NO: 16853 - protein, 5 aa, Artificial Sequence
  Description of Artificial Sequence: Synthetic peptide
  XENP018143 vhCDR1
NYWMN

SEQ ID NO: 16854 - protein, 19 aa, Artificial Sequence
  Description of Artificial Sequence: Synthetic peptide
  XENP018143 vhCDR2
EIRLKSNNYATHYAEPVKG

SEQ ID NO: 16855 - protein, 11 aa, Artificial Sequence
  Description of Artificial Sequence: Synthetic peptide
  XENP018143 vhCDR3
YYGNYGGYFDV

SEQ ID NO: 16856 - protein, 214 aa, Artificial Sequence; identical to SEQ ID NO: 16226
  Description of Artificial Sequence: Synthetic polypeptide
  XENP018143 1G6_H1.46_L1_IgG1_PVA_/S267K Light Chain

SEQ ID NO: 16857 - protein, 107 aa, Artificial Sequence; identical to SEQ ID NO: 10923
  Description of Artificial Sequence: Synthetic polypeptide
  VL of XENP018143

SEQ ID NO: 16858 - protein, 11 aa, Artificial Sequence
  Description of Artificial Sequence: Synthetic peptide
  XENP018143 vlCDR1
RASQSVSNDVA

SEQ ID NO: 16859 - protein, 7 aa, Artificial Sequence
  Description of Artificial Sequence: Synthetic peptide
  XENP018143 vlCDR2
YASHRYT

SEQ ID NO: 16860 - protein, 9 aa, Artificial Sequence
  Description of Artificial Sequence: Synthetic peptide
  XENP018143 vlCDR3
QQDYSSPRT

SEQ ID NO: 16861 - protein, 451 aa, Artificial Sequence
  Description of Artificial Sequence: Synthetic polypeptide
  XENP018144 1G6_H1.47_L1_IgG1_PVA_/S267K Heavy Chain
EVQLVESGGGLVKPGGSLRLSCAASGFTFSNYWMNWFRQAPGKGLEWVGEIRLKSNNYATHYAEPVKGRFTISRDDSKSTVYLQMNSLKTEDTAVYYCTRYYGNYGGYFDVWGAGTLVTVSSASTKGPSVFPLAPSSKSTSGGTAALGCLVKDYFPEPVTVSWNSGALTSGVHTFPAVLQSSGLYSLSSVVTVPSSSLGTQTYICNVNHKPSNTKVDKKVEPKSCDKTHTCPPCPAPPVAGPSVFLFPPKPKDTLMISRTPEVTCVVVDVKHEDPEVKFNWYVDGVEVHNAKTKPREEQYNSTYRVVSVLTVLHQDWLNGKEYKCKVSNKALPAPIEKTISKAKGQPREPQVYTLPPSREEMTKNQVSLTCLVKGFYPSDIAVEWESNGQPENNYKTTPPVLDSDGSFFLYSKLTVDKSRWQQGNVFSCSVMHEALHNHYTQKSLSLSPGK

SEQ ID NO: 16862 - protein, 122 aa, Artificial Sequence; identical to SEQ ID NO: 11453
  Description of Artificial Sequence: Synthetic polypeptide
  VH of XENP018144

SEQ ID NO: 16863 - protein, 5 aa, Artificial Sequence
  Description of Artificial Sequence: Synthetic peptide
  XENP018144 vhCDR1
NYWMN

SEQ ID NO: 16864 - protein, 19 aa, Artificial Sequence
  Description of Artificial Sequence: Synthetic peptide
  XENP018144 vhCDR2
EIRLKSNNYATHYAEPVKG

SEQ ID NO: 16865 - protein, 11 aa, Artificial Sequence
  Description of Artificial Sequence: Synthetic peptide
  XENP018144 vhCDR3
YYGNYGGYFDV

SEQ ID NO: 16866 - protein, 214 aa, Artificial Sequence; identical to SEQ ID NO: 16226
  Description of Artificial Sequence: Synthetic polypeptide
  XENP018144 1G6_H1.47_L1_IgG1_PVA_/S267K Light Chain

SEQ ID NO: 16867 - protein, 107 aa, Artificial Sequence; identical to SEQ ID NO: 10923
  Description of Artificial Sequence: Synthetic polypeptide
  VL of XENP018144

SEQ ID NO: 16868 - protein, 11 aa, Artificial Sequence
  Description of Artificial Sequence: Synthetic peptide
  XENP018144 vlCDR1
RASQSVSNDVA

SEQ ID NO: 16869 - protein, 7 aa, Artificial Sequence
  Description of Artificial Sequence: Synthetic peptide
  XENP018144 vlCDR2
YASHRYT

SEQ ID NO: 16870 - protein, 9 aa, Artificial Sequence
  Description of Artificial Sequence: Synthetic peptide
  XENP018144 vlCDR3
QQDYSSPRT

SEQ ID NO: 16871 - protein, 451 aa, Artificial Sequence
  Description of Artificial Sequence: Synthetic polypeptide
  XENP018145 1G6_H1.48_L1_IgG1_PVA_/S267K Heavy Chain
EVQLVESGGGLVKPGGSLRLSCAASGFTFSNYWMNWVRKAPGKGLEWVGEIRLKSNNYATHYAEPVKGRFTISRDDSKSTVYLQMNSLKTEDTAVYYCTRYYGNYGGYFDVWGAGTLVTVSSASTKGPSVFPLAPSSKSTSGGTAALGCLVKDYFPEPVTVSWNSGALTSGVHTFPAVLQSSGLYSLSSVVTVPSSSLGTQTYICNVNHKPSNTKVDKKVEPKSCDKTHTCPPCPAPPVAGPSVFLFPPKPKDTLMISRTPEVTCVVVDVKHEDPEVKFNWYVDGVEVHNAKTKPREEQYNSTYRVVSVLTVLHQDWLNGKEYKCKVSNKALPAPIEKTISKAKGQPREPQVYTLPPSREEMTKNQVSLTCLVKGFYPSDIAVEWESNGQPENNYKTTPPVLDSDGSFFLYSKLTVDKSRWQQGNVFSCSVMHEALHNHYTQKSLSLSPGK

SEQ ID NO: 16872 - protein, 122 aa, Artificial Sequence; identical to SEQ ID NO: 11462
  Description of Artificial Sequence: Synthetic polypeptide
  VH of XENP018145

SEQ ID NO: 16873 - protein, 5 aa, Artificial Sequence
  Description of Artificial Sequence: Synthetic peptide
  XENP018145 vhCDR1
NYWMN

SEQ ID NO: 16874 - protein, 19 aa, Artificial Sequence
  Description of Artificial Sequence: Synthetic peptide
  XENP018145 vhCDR2
EIRLKSNNYATHYAEPVKG

SEQ ID NO: 16875 - protein, 11 aa, Artificial Sequence
  Description of Artificial Sequence: Synthetic peptide
  XENP018145 vhCDR3
YYGNYGGYFDV

SEQ ID NO: 16876 - protein, 214 aa, Artificial Sequence; identical to SEQ ID NO: 16226
  Description of Artificial Sequence: Synthetic polypeptide
  XENP018145 1G6_H1.48_L1_IgG1_PVA_/S267K Light Chain

SEQ ID NO: 16877 - protein, 107 aa, Artificial Sequence; identical to SEQ ID NO: 10923
  Description of Artificial Sequence: Synthetic polypeptide
  VL of XENP018145

SEQ ID NO: 16878 - protein, 11 aa, Artificial Sequence
  Description of Artificial Sequence: Synthetic peptide
  XENP018145 vlCDR1
RASQSVSNDVA

SEQ ID NO: 16879 - protein, 7 aa, Artificial Sequence
  Description of Artificial Sequence: Synthetic peptide
  XENP018145 vlCDR2
YASHRYT

SEQ ID NO: 16880 - protein, 9 aa, Artificial Sequence
  Description of Artificial Sequence: Synthetic peptide
  XENP018145 vlCDR3
QQDYSSPRT

SEQ ID NO: 16881 - protein, 451 aa, Artificial Sequence
  Description of Artificial Sequence: Synthetic polypeptide
  XENP018146 1G6_H1.49_L1_IgG1_PVA_/S267K Heavy Chain
EVQLVESGGGLVKPGGSLRLSCAASGFTFSNYWMNWVRQSPGKGLEWVGEIRLKSNNYATHYAEPVKGRFTISRDDSKSTVYLQMNSLKTEDTAVYYCTRYYGNYGGYFDVWGAGTLVTVSSASTKGPSVFPLAPSSKSTSGGTAALGCLVKDYFPEPVTVSWNSGALTSGVHTFPAVLQSSGLYSLSSVVTVPSSSLGTQTYICNVNHKPSNTKVDKKVEPKSCDKTHTCPPCPAPPVAGPSVFLFPPKPKDTLMISRTPEVTCVVVDVKHEDPEVKFNWYVDGVEVHNAKTKPREEQYNSTYRVVSVLTVLHQDWLNGKEYKCKVSNKALPAPIEKTISKAKGQPREPQVYTLPPSREEMTKNQVSLTCLVKGFYPSDIAVEWESNGQPENNYKTTPPVLDSDGSFFLYSKLTVDKSRWQQGNVFSCSVMHEALHNHYTQKSLSLSPGK

SEQ ID NO: 16882 - protein, 122 aa, Artificial Sequence; identical to SEQ ID NO: 11468
  Description of Artificial Sequence: Synthetic polypeptide
  VH of XENP018146

SEQ ID NO: 16883 - protein, 5 aa, Artificial Sequence
  Description of Artificial Sequence: Synthetic peptide
  XENP018146 vhCDR1
NYWMN

SEQ ID NO: 16884 - protein, 19 aa, Artificial Sequence
  Description of Artificial Sequence: Synthetic peptide
  XENP018146 vhCDR2
EIRLKSNNYATHYAEPVKG

SEQ ID NO: 16885 - protein, 11 aa, Artificial Sequence
  Description of Artificial Sequence: Synthetic peptide
  XENP018146 vhCDR3
YYGNYGGYFDV

SEQ ID NO: 16886 - protein, 214 aa, Artificial Sequence; identical to SEQ ID NO: 16226
  Description of Artificial Sequence: Synthetic polypeptide
  XENP018146 1G6_H1.49_L1_IgG1_PVA_/S267K Light Chain

SEQ ID NO: 16887 - protein, 107 aa, Artificial Sequence; identical to SEQ ID NO: 10923
  Description of Artificial Sequence: Synthetic polypeptide
  VL of XENP018146

SEQ ID NO: 16888 - protein, 11 aa, Artificial Sequence
  Description of Artificial Sequence: Synthetic peptide
  XENP018146 vlCDR1
RASQSVSNDVA

SEQ ID NO: 16889 - protein, 7 aa, Artificial Sequence
  Description of Artificial Sequence: Synthetic peptide
  XENP018146 vlCDR2
YASHRYT

SEQ ID NO: 16890 - protein, 9 aa, Artificial Sequence
  Description of Artificial Sequence: Synthetic peptide
  XENP018146 vlCDR3
QQDYSSPRT

SEQ ID NO: 16891 - protein, 451 aa, Artificial Sequence
  Description of Artificial Sequence: Synthetic polypeptide
  XENP018147 1G6_H1.50_L1_IgG1_PVA_/S267K Heavy Chain
EVQLVESGGGLVKPGGSLRLSCAASGFTFSNYWMNWVRQAPEKGLEWVGEIRLKSNNYATHYAEPVKGRFTISRDDSKSTVYLQMNSLKTEDTAVYYCTRYYGNYGGYFDVWGAGTLVTVSSASTKGPSVFPLAPSSKSTSGGTAALGCLVKDYFPEPVTVSWNSGALTSGVHTFPAVLQSSGLYSLSSVVTVPSSSLGTQTYICNVNHKPSNTKVDKKVEPKSCDKTHTCPPCPAPPVAGPSVFLFPPKPKDTLMISRTPEVTCVVVDVKHEDPEVKFNWYVDGVEVHNAKTKPREEQYNSTYRVVSVLTVLHQDWLNGKEYKCKVSNKALPAPIEKTISKAKGQPREPQVYTLPPSREEMTKNQVSLTCLVKGFYPSDIAVEWESNGQPENNYKTTPPVLDSDGSFFLYSKLTVDKSRWQQGNVFSCSVMHEALHNHYTQKSLSLSPGK

SEQ ID NO: 16892 - protein, 122 aa, Artificial Sequence; identical to SEQ ID NO: 11477
  Description of Artificial Sequence: Synthetic polypeptide
  VH of XENP018147

SEQ ID NO: 16893 - protein, 5 aa, Artificial Sequence
  Description of Artificial Sequence: Synthetic peptide
  XENP018147 vhCDR1
NYWMN

SEQ ID NO: 16894 - protein, 19 aa, Artificial Sequence
  Description of Artificial Sequence: Synthetic peptide
  XENP018147 vhCDR2
EIRLKSNNYATHYAEPVKG

SEQ ID NO: 16895 - protein, 11 aa, Artificial Sequence
  Description of Artificial Sequence: Synthetic peptide
  XENP018147 vhCDR3
YYGNYGGYFDV

SEQ ID NO: 16896 - protein, 214 aa, Artificial Sequence; identical to SEQ ID NO: 16226
  Description of Artificial Sequence: Synthetic polypeptide
  XENP018147 1G6_H1.50_L1_IgG1_PVA_/S267K Light Chain

SEQ ID NO: 16897 - protein, 107 aa, Artificial Sequence; identical to SEQ ID NO: 10923
  Description of Artificial Sequence: Synthetic polypeptide
  VL of XENP018147

SEQ ID NO: 16898 - protein, 11 aa, Artificial Sequence
  Description of Artificial Sequence: Synthetic peptide
  XENP018147 vlCDR1
RASQSVSNDVA

SEQ ID NO: 16899 - protein, 7 aa, Artificial Sequence
  Description of Artificial Sequence: Synthetic peptide
  XENP018147 vlCDR2
YASHRYT

SEQ ID NO: 16900 - protein, 9 aa, Artificial Sequence
  Description of Artificial Sequence: Synthetic peptide
  XENP018147 vlCDR3
QQDYSSPRT

SEQ ID NO: 16901 - protein, 451 aa, Artificial Sequence
  Description of Artificial Sequence: Synthetic polypeptide
  XENP018148 1G6_H1.51_L1_IgG1_PVA_/S267K Heavy Chain
EVQLVESGGGLVKPGGSLRLSCAASGFTFSNYWMNWVRQAPGKGLEYVGEIRLKSNNYATHYAEPVKGRFTISRDDSKSTVYLQMNSLKTEDTAVYYCTRYYGNYGGYFDVWGAGTLVTVSSASTKGPSVFPLAPSSKSTSGGTAALGCLVKDYFPEPVTVSWNSGALTSGVHTFPAVLQSSGLYSLSSVVTVPSSSLGTQTYICNVNHKPSNTKVDKKVEPKSCDKTHTCPPCPAPPVAGPSVFLFPPKPKDTLMISRTPEVTCVVVDVKHEDPEVKFNWYVDGVEVHNAKTKPREEQYNSTYRVVSVLTVLHQDWLNGKEYKCKVSNKALPAPIEKTISKAKGQPREPQVYTLPPSREEMTKNQVSLTCLVKGFYPSDIAVEWESNGQPENNYKTTPPVLDSDGSFFLYSKLTVDKSRWQQGNVFSCSVMHEALHNHYTQKSLSLSPGK

SEQ ID NO: 16902 - protein, 122 aa, Artificial Sequence; identical to SEQ ID NO: 11486
  Description of Artificial Sequence: Synthetic polypeptide
  VH of XENP018148

SEQ ID NO: 16903 - protein, 5 aa, Artificial Sequence
  Description of Artificial Sequence: Synthetic peptide
  XENP018148 vhCDR1
NYWMN

SEQ ID NO: 16904 - protein, 19 aa, Artificial Sequence
  Description of Artificial Sequence: Synthetic peptide
  XENP018148 vhCDR2
EIRLKSNNYATHYAEPVKG

SEQ ID NO: 16905 - protein, 11 aa, Artificial Sequence
  Description of Artificial Sequence: Synthetic peptide
  XENP018148 vhCDR3
YYGNYGGYFDV

SEQ ID NO: 16906 - protein, 214 aa, Artificial Sequence; identical to SEQ ID NO: 16226
  Description of Artificial Sequence: Synthetic polypeptide
  XENP018148 1G6_H1.51_L1_IgG1_PVA_/S267K Light Chain

SEQ ID NO: 16907 - protein, 107 aa, Artificial Sequence; identical to SEQ ID NO: 10923
  Description of Artificial Sequence: Synthetic polypeptide
  VL of XENP018148

SEQ ID NO: 16908 - protein, 11 aa, Artificial Sequence
  Description of Artificial Sequence: Synthetic peptide
  XENP018148 vlCDR1
RASQSVSNDVA

SEQ ID NO: 16909 - protein, 7 aa, Artificial Sequence
  Description of Artificial Sequence: Synthetic peptide
  XENP018148 vlCDR2
YASHRYT

SEQ ID NO: 16910 - protein, 9 aa, Artificial Sequence
  Description of Artificial Sequence: Synthetic peptide
  XENP018148 vlCDR3
QQDYSSPRT

SEQ ID NO: 16911 - protein, 451 aa, Artificial Sequence
  Description of Artificial Sequence: Synthetic polypeptide
  XENP018149 1G6_H1.52_L1_IgG1_PVA_/S267K Heavy Chain
EVQLVESGGGLVKPGGSLRLSCAASGFTFSNYWMNWVRQAPGKGLEWVAEIRLKSNNYATHYAEPVKGRFTISRDDSKSTVYLQMNSLKTEDTAVYYCTRYYGNYGGYFDVWGAGTLVTVSSASTKGPSVFPLAPSSKSTSGGTAALGCLVKDYFPEPVTVSWNSGALTSGVHTFPAVLQSSGLYSLSSVVTVPSSSLGTQTYICNVNHKPSNTKVDKKVEPKSCDKTHTCPPCPAPPVAGPSVFLFPPKPKDTLMISRTPEVTCVVVDVKHEDPEVKFNWYVDGVEVHNAKTKPREEQYNSTYRVVSVLTVLHQDWLNGKEYKCKVSNKALPAPIEKTISKAKGQPREPQVYTLPPSREEMTKNQVSLTCLVKGFYPSDIAVEWESNGQPENNYKTTPPVLDSDGSFFLYSKLTVDKSRWQQGNVFSCSVMHEALHNHYTQKSLSLSPGK

SEQ ID NO: 16912 - protein, 122 aa, Artificial Sequence; identical to SEQ ID NO: 11495
  Description of Artificial Sequence: Synthetic polypeptide
  VH of XENP018149

SEQ ID NO: 16913 - protein, 5 aa, Artificial Sequence
  Description of Artificial Sequence: Synthetic peptide
  XENP018149 vhCDR1
NYWMN

SEQ ID NO: 16914 - protein, 19 aa, Artificial Sequence
  Description of Artificial Sequence: Synthetic peptide
  XENP018149 vhCDR2
EIRLKSNNYATHYAEPVKG

SEQ ID NO: 16915 - protein, 11 aa, Artificial Sequence
  Description of Artificial Sequence: Synthetic peptide
  XENP018149 vhCDR3
YYGNYGGYFDV

SEQ ID NO: 16916 - protein, 214 aa, Artificial Sequence; identical to SEQ ID NO: 16226
  Description of Artificial Sequence: Synthetic polypeptide
  XENP018149 1G6_H1.52_L1_IgG1_PVA_/S267K Light Chain

SEQ ID NO: 16917 - protein, 107 aa, Artificial Sequence; identical to SEQ ID NO: 10923
  Description of Artificial Sequence: Synthetic polypeptide
  VL of XENP018149

SEQ ID NO: 16918 - protein, 11 aa, Artificial Sequence
  Description of Artificial Sequence: Synthetic peptide
  XENP018149 vlCDR1
RASQSVSNDVA

SEQ ID NO: 16919 - protein, 7 aa, Artificial Sequence
  Description of Artificial Sequence: Synthetic peptide
  XENP018149 vlCDR2
YASHRYT

SEQ ID NO: 16920 - protein, 9 aa, Artificial Sequence
  Description of Artificial Sequence: Synthetic peptide
  XENP018149 vlCDR3
QQDYSSPRT

SEQ ID NO: 16921 - protein, 451 aa, Artificial Sequence
  Description of Artificial Sequence: Synthetic polypeptide
  XENP018150 1G6_H1.53_L1_IgG1_PVA_/S267K Heavy Chain
EVQLVESGGGLVKPGGSLRLSCAASGFTFSNYWMNWVRQAPGKGLEWVSEIRLKSNNYATHYAEPVKGRFTISRDDSKSTVYLQMNSLKTEDTAVYYCTRYYGNYGGYFDVWGAGTLVTVSSASTKGPSVFPLAPSSKSTSGGTAALGCLVKDYFPEPVTVSWNSGALTSGVHTFPAVLQSSGLYSLSSVVTVPSSSLGTQTYICNVNHKPSNTKVDKKVEPKSCDKTHTCPPCPAPPVAGPSVFLFPPKPKDTLMISRTPEVTCVVVDVKHEDPEVKFNWYVDGVEVHNAKTKPREEQYNSTYRVVSVLTVLHQDWLNGKEYKCKVSNKALPAPIEKTISKAKGQPREPQVYTLPPSREEMTKNQVSLTCLVKGFYPSDIAVEWESNGQPENNYKTTPPVLDSDGSFFLYSKLTVDKSRWQQGNVFSCSVMHEALHNHYTQKSLSLSPGK

SEQ ID NO: 16922 - protein, 122 aa, Artificial Sequence; identical to SEQ ID NO: 11504
  Description of Artificial Sequence: Synthetic polypeptide
  VH of XENP018150

SEQ ID NO: 16923 - protein, 5 aa, Artificial Sequence
  Description of Artificial Sequence: Synthetic peptide
  XENP018150 vhCDR1
NYWMN

SEQ ID NO: 16924 - protein, 19 aa, Artificial Sequence
  Description of Artificial Sequence: Synthetic peptide
  XENP018150 vhCDR2
EIRLKSNNYATHYAEPVKG

SEQ ID NO: 16925 - protein, 11 aa, Artificial Sequence
  Description of Artificial Sequence: Synthetic peptide
  XENP018150 vhCDR3
YYGNYGGYFDV

SEQ ID NO: 16926 - protein, 214 aa, Artificial Sequence; identical to SEQ ID NO: 16226
  Description of Artificial Sequence: Synthetic polypeptide
  XENP018150 1G6_H1.53_L1_IgG1_PVA_/S267K Light Chain

SEQ ID NO: 16927 - protein, 107 aa, Artificial Sequence; identical to SEQ ID NO: 10923
  Description of Artificial Sequence: Synthetic polypeptide
  VL of XENP018150

SEQ ID NO: 16928 - protein, 11 aa, Artificial Sequence
  Description of Artificial Sequence: Synthetic peptide
  XENP018150 vlCDR1
RASQSVSNDVA

SEQ ID NO: 16929 - protein, 7 aa, Artificial Sequence
  Description of Artificial Sequence: Synthetic peptide
  XENP018150 vlCDR2
YASHRYT

SEQ ID NO: 16930 - protein, 9 aa, Artificial Sequence
  Description of Artificial Sequence: Synthetic peptide
  XENP018150 vlCDR3
QQDYSSPRT

SEQ ID NO: 16931 - protein, 451 aa, Artificial Sequence
  Description of Artificial Sequence: Synthetic polypeptide
  XENP018151 1G6_H1.54_L1_IgG1_PVA_/S267K Heavy Chain
EVQLVESGGGLVKPGGSLRLSCAASGFTFSNYWMNWVRQAPGKGLEWVGQIRLKSNNYATHYAEPVKGRFTISRDDSKSTVYLQMNSLKTEDTAVYYCTRYYGNYGGYFDVWGAGTLVTVSSASTKGPSVFPLAPSSKSTSGGTAALGCLVKDYFPEPVTVSWNSGALTSGVHTFPAVLQSSGLYSLSSVVTVPSSSLGTQTYICNVNHKPSNTKVDKKVEPKSCDKTHTCPPCPAPPVAGPSVFLFPPKPKDTLMISRTPEVTCVVVDVKHEDPEVKFNWYVDGVEVHNAKTKPREEQYNSTYRVVSVLTVLHQDWLNGKEYKCKVSNKALPAPIEKTISKAKGQPREPQVYTLPPSREEMTKNQVSLTCLVKGFYPSDIAVEWESNGQPENNYKTTPPVLDSDGSFFLYSKLTVDKSRWQQGNVFSCSVMHEALHNHYTQKSLSLSPGK

SEQ ID NO: 16932 - protein, 122 aa, Artificial Sequence; identical to SEQ ID NO: 11513
  Description of Artificial Sequence: Synthetic polypeptide
  VH of XENP018151

SEQ ID NO: 16933 - protein, 5 aa, Artificial Sequence
  Description of Artificial Sequence: Synthetic peptide
  XENP018151 vhCDR1
NYWMN

SEQ ID NO: 16934 - protein, 19 aa, Artificial Sequence
  Description of Artificial Sequence: Synthetic peptide
  XENP018151 vhCDR2
QIRLKSNNYATHYAEPVKG

SEQ ID NO: 16935 - protein, 11 aa, Artificial Sequence
  Description of Artificial Sequence: Synthetic peptide
  XENP018151 vhCDR3
YYGNYGGYFDV

SEQ ID NO: 16936 - protein, 214 aa, Artificial Sequence; identical to SEQ ID NO: 16226
  Description of Artificial Sequence: Synthetic polypeptide
  XENP018151 1G6_H1.54_L1_IgG1_PVA_/S267K Light Chain

SEQ ID NO: 16937 - protein, 107 aa, Artificial Sequence; identical to SEQ ID NO: 10923
  Description of Artificial Sequence: Synthetic polypeptide
  VL of XENP018151

SEQ ID NO: 16938 - protein, 11 aa, Artificial Sequence
  Description of Artificial Sequence: Synthetic peptide
  XENP018151 vlCDR1
RASQSVSNDVA

SEQ ID NO: 16939 - protein, 7 aa, Artificial Sequence
  Description of Artificial Sequence: Synthetic peptide
  XENP018151 vlCDR2
YASHRYT

SEQ ID NO: 16940 - protein, 9 aa, Artificial Sequence
  Description of Artificial Sequence: Synthetic peptide
  XENP018151 vlCDR3
QQDYSSPRT

SEQ ID NO: 16941 - protein, 451 aa, Artificial Sequence
  Description of Artificial Sequence: Synthetic polypeptide
  XENP018152 1G6_H1.55_L1_IgG1_PVA_/S267K Heavy Chain
EVQLVESGGGLVKPGGSLRLSCAASGFTFSNYWMNWVRQAPGKGLEWVGDIRLKSNNYATHYAEPVKGRFTISRDDSKSTVYLQMNSLKTEDTAVYYCTRYYGNYGGYFDVWGAGTLVTVSSASTKGPSVFPLAPSSKSTSGGTAALGCLVKDYFPEPVTVSWNSGALTSGVHTFPAVLQSSGLYSLSSVVTVPSSSLGTQTYICNVNHKPSNTKVDKKVEPKSCDKTHTCPPCPAPPVAGPSVFLFPPKPKDTLMISRTPEVTCVVVDVKHEDPEVKFNWYVDGVEVHNAKTKPREEQYNSTYRVVSVLTVLHQDWLNGKEYKCKVSNKALPAPIEKTISKAKGQPREPQVYTLPPSREEMTKNQVSLTCLVKGFYPSDIAVEWESNGQPENNYKTTPPVLDSDGSFFLYSKLTVDKSRWQQGNVFSCSVMHEALHNHYTQKSLSLSPGK

SEQ ID NO: 16942 - protein, 122 aa, Artificial Sequence; identical to SEQ ID NO: 11522
  Description of Artificial Sequence: Synthetic polypeptide
  VH of XENP018152

SEQ ID NO: 16943 - protein, 5 aa, Artificial Sequence
  Description of Artificial Sequence: Synthetic peptide
  XENP018152 vhCDR1
NYWMN

SEQ ID NO: 16944 - protein, 19 aa, Artificial Sequence
  Description of Artificial Sequence: Synthetic peptide
  XENP018152 vhCDR2
DIRLKSNNYATHYAEPVKG

SEQ ID NO: 16945 - protein, 11 aa, Artificial Sequence
  Description of Artificial Sequence: Synthetic peptide
  XENP018152 vhCDR3
YYGNYGGYFDV

SEQ ID NO: 16946 - protein, 214 aa, Artificial Sequence; identical to SEQ ID NO: 16226
  Description of Artificial Sequence: Synthetic polypeptide
  XENP018152 1G6_H1.55_L1_IgG1_PVA_/S267K Light Chain

SEQ ID NO: 16947 - protein, 107 aa, Artificial Sequence; identical to SEQ ID NO: 10923
  Description of Artificial Sequence: Synthetic polypeptide
  VL of XENP018152

SEQ ID NO: 16948 - protein, 11 aa, Artificial Sequence
  Description of Artificial Sequence: Synthetic peptide
  XENP018152 vlCDR1
RASQSVSNDVA

SEQ ID NO: 16949 - protein, 7 aa, Artificial Sequence
  Description of Artificial Sequence: Synthetic peptide
  XENP018152 vlCDR2
YASHRYT

SEQ ID NO: 16950 - protein, 9 aa, Artificial Sequence
  Description of Artificial Sequence: Synthetic peptide
  XENP018152 vlCDR3
QQDYSSPRT

SEQ ID NO: 16951 - protein, 451 aa, Artificial Sequence
  Description of Artificial Sequence: Synthetic polypeptide
  XENP018153 1G6_H1.56_L1_IgG1_PVA_/S267K Heavy Chain
EVQLVESGGGLVKPGGSLRLSCAASGFTFSNYWMNWVRQAPGKGLEWVGKIRLKSNNYATHYAEPVKGRFTISRDDSKSTVYLQMNSLKTEDTAVYYCTRYYGNYGGYFDVWGAGTLVTVSSASTKGPSVFPLAPSSKSTSGGTAALGCLVKDYFPEPVTVSWNSGALTSGVHTFPAVLQSSGLYSLSSVVTVPSSSLGTQTYICNVNHKPSNTKVDKKVEPKSCDKTHTCPPCPAPPVAGPSVFLFPPKPKDTLMISRTPEVTCVVVDVKHEDPEVKFNWYVDGVEVHNAKTKPREEQYNSTYRVVSVLTVLHQDWLNGKEYKCKVSNKALPAPIEKTISKAKGQPREPQVYTLPPSREEMTKNQVSLTCLVKGFYPSDIAVEWESNGQPENNYKTTPPVLDSDGSFFLYSKLTVDKSRWQQGNVFSCSVMHEALHNHYTQKSLSLSPGK

SEQ ID NO: 16952 - protein, 122 aa, Artificial Sequence; identical to SEQ ID NO: 11531
  Description of Artificial Sequence: Synthetic polypeptide
  VH of XENP018153

SEQ ID NO: 16953 - protein, 5 aa, Artificial Sequence
  Description of Artificial Sequence: Synthetic peptide
  XENP018153 vhCDR1
NYWMN

SEQ ID NO: 16954 - protein, 19 aa, Artificial Sequence
  Description of Artificial Sequence: Synthetic peptide
  XENP018153 vhCDR2
KIRLKSNNYATHYAEPVKG

SEQ ID NO: 16955 - protein, 11 aa, Artificial Sequence
  Description of Artificial Sequence: Synthetic peptide
  XENP018153 vhCDR3
YYGNYGGYFDV

SEQ ID NO: 16956 - protein, 214 aa, Artificial Sequence; identical to SEQ ID NO: 16226
  Description of Artificial Sequence: Synthetic polypeptide
  XENP018153 1G6_H1.56_L1_IgG1_PVA_/S267K Light Chain

SEQ ID NO: 16957 - protein, 107 aa, Artificial Sequence; identical to SEQ ID NO: 10923
  Description of Artificial Sequence: Synthetic polypeptide
  VL of XENP018153

SEQ ID NO: 16958 - protein, 11 aa, Artificial Sequence
  Description of Artificial Sequence: Synthetic peptide
  XENP018153 vlCDR1
RASQSVSNDVA

SEQ ID NO: 16959 - protein, 7 aa, Artificial Sequence
  Description of Artificial Sequence: Synthetic peptide
  XENP018153 vlCDR2
YASHRYT

SEQ ID NO: 16960 - protein, 9 aa, Artificial Sequence
  Description of Artificial Sequence: Synthetic peptide
  XENP018153 vlCDR3
QQDYSSPRT

SEQ ID NO: 16961 - protein, 451 aa, Artificial Sequence
  Description of Artificial Sequence: Synthetic polypeptide
  XENP018154 1G6_H1.57_L1_IgG1_PVA_/S267K Heavy Chain
EVQLVESGGGLVKPGGSLRLSCAASGFTFSNYWMNWVRQAPGKGLEWVGSIRLKSNNYATHYAEPVKGRFTISRDDSKSTVYLQMNSLKTEDTAVYYCTRYYGNYGGYFDVWGAGTLVTVSSASTKGPSVFPLAPSSKSTSGGTAALGCLVKDYFPEPVTVSWNSGALTSGVHTFPAVLQSSGLYSLSSVVTVPSSSLGTQTYICNVNHKPSNTKVDKKVEPKSCDKTHTCPPCPAPPVAGPSVFLFPPKPKDTLMISRTPEVTCVVVDVKHEDPEVKFNWYVDGVEVHNAKTKPREEQYNSTYRVVSVLTVLHQDWLNGKEYKCKVSNKALPAPIEKTISKAKGQPREPQVYTLPPSREEMTKNQVSLTCLVKGFYPSDIAVEWESNGQPENNYKTTPPVLDSDGSFFLYSKLTVDKSRWQQGNVFSCSVMHEALHNHYTQKSLSLSPGK

SEQ ID NO: 16962 - protein, 122 aa, Artificial Sequence; identical to SEQ ID NO: 11540
  Description of Artificial Sequence: Synthetic polypeptide
  VH of XENP018154

SEQ ID NO: 16963 - protein, 5 aa, Artificial Sequence
  Description of Artificial Sequence: Synthetic peptide
  XENP018154 vhCDR1
NYWMN

SEQ ID NO: 16964 - protein, 19 aa, Artificial Sequence
  Description of Artificial Sequence: Synthetic peptide
  XENP018154 vhCDR2
SIRLKSNNYATHYAEPVKG

SEQ ID NO: 16965 - protein, 11 aa, Artificial Sequence
  Description of Artificial Sequence: Synthetic peptide
  XENP018154 vhCDR3
YYGNYGGYFDV

SEQ ID NO: 16966 - protein, 214 aa, Artificial Sequence; identical to SEQ ID NO: 16226
  Description of Artificial Sequence: Synthetic polypeptide
  XENP018154 1G6_H1.57_L1_IgG1_PVA_/S267K Light Chain

SEQ ID NO: 16967 - protein, 107 aa, Artificial Sequence; identical to SEQ ID NO: 10923
  Description of Artificial Sequence: Synthetic polypeptide
  VL of XENP018154

SEQ ID NO: 16968 - protein, 11 aa, Artificial Sequence
  Description of Artificial Sequence: Synthetic peptide
  XENP018154 vlCDR1
RASQSVSNDVA

SEQ ID NO: 16969 - protein, 7 aa, Artificial Sequence
  Description of Artificial Sequence: Synthetic peptide
  XENP018154 vlCDR2
YASHRYT

SEQ ID NO: 16970 - protein, 9 aa, Artificial Sequence
  Description of Artificial Sequence: Synthetic peptide
  XENP018154 vlCDR3
QQDYSSPRT

SEQ ID NO: 16971 - protein, 451 aa, Artificial Sequence
  Description of Artificial Sequence: Synthetic polypeptide
  XENP018155 1G6_H1.58_L1_IgG1_PVA_/S267K Heavy Chain
EVQLVESGGGLVKPGGSLRLSCAASGFTFSNYWMNWVRQAPGKGLEWVGHIRLKSNNYATHYAEPVKGRFTISRDDSKSTVYLQMNSLKTEDTAVYYCTRYYGNYGGYFDVWGAGTLVTVSSASTKGPSVFPLAPSSKSTSGGTAALGCLVKDYFPEPVTVSWNSGALTSGVHTFPAVLQSSGLYSLSSVVTVPSSSLGTQTYICNVNHKPSNTKVDKKVEPKSCDKTHTCPPCPAPPVAGPSVFLFPPKPKDTLMISRTPEVTCVVVDVKHEDPEVKFNWYVDGVEVHNAKTKPREEQYNSTYRVVSVLTVLHQDWLNGKEYKCKVSNKALPAPIEKTISKAKGQPREPQVYTLPPSREEMTKNQVSLTCLVKGFYPSDIAVEWESNGQPENNYKTTPPVLDSDGSFFLYSKLTVDKSRWQQGNVFSCSVMHEALHNHYTQKSLSLSPGK

SEQ ID NO: 16972 - protein, 122 aa, Artificial Sequence; identical to SEQ ID NO: 11549
  Description of Artificial Sequence: Synthetic polypeptide
  VH of XENP018155

SEQ ID NO: 16973 - protein, 5 aa, Artificial Sequence
  Description of Artificial Sequence: Synthetic peptide
  XENP018155 vhCDR1
NYWMN

SEQ ID NO: 16974 - protein, 19 aa, Artificial Sequence
  Description of Artificial Sequence: Synthetic peptide
  XENP018155 vhCDR2
HIRLKSNNYATHYAEPVKG

SEQ ID NO: 16975 - protein, 11 aa, Artificial Sequence
  Description of Artificial Sequence: Synthetic peptide
  XENP018155 vhCDR3
YYGNYGGYFDV

SEQ ID NO: 16976 - protein, 214 aa, Artificial Sequence; identical to SEQ ID NO: 16226
  Description of Artificial Sequence: Synthetic polypeptide
  XENP018155 1G6_H1.58_L1_IgG1_PVA_/S267K Light Chain

SEQ ID NO: 16977 - protein, 107 aa, Artificial Sequence; identical to SEQ ID NO: 10923
  Description of Artificial Sequence: Synthetic polypeptide
  VL of XENP018155

SEQ ID NO: 16978 - protein, 11 aa, Artificial Sequence
  Description of Artificial Sequence: Synthetic peptide
  XENP018155 vlCDR1
RASQSVSNDVA

SEQ ID NO: 16979 - protein, 7 aa, Artificial Sequence
  Description of Artificial Sequence: Synthetic peptide
  XENP018155 vlCDR2
YASHRYT

SEQ ID NO: 16980 - protein, 9 aa, Artificial Sequence
  Description of Artificial Sequence: Synthetic peptide
  XENP018155 vlCDR3
QQDYSSPRT

SEQ ID NO: 16981 - protein, 451 aa, Artificial Sequence
  Description of Artificial Sequence: Synthetic polypeptide
  XENP018156 1G6_H1.59_L1_IgG1_PVA_/S267K Heavy Chain
EVQLVESGGGLVKPGGSLRLSCAASGFTFSNYWMNWVRQAPGKGLEWVGAIRLKSNNYATHYAEPVKGRFTISRDDSKSTVYLQMNSLKTEDTAVYYCTRYYGNYGGYFDVWGAGTLVTVSSASTKGPSVFPLAPSSKSTSGGTAALGCLVKDYFPEPVTVSWNSGALTSGVHTFPAVLQSSGLYSLSSVVTVPSSSLGTQTYICNVNHKPSNTKVDKKVEPKSCDKTHTCPPCPAPPVAGPSVFLFPPKPKDTLMISRTPEVTCVVVDVKHEDPEVKFNWYVDGVEVHNAKTKPREEQYNSTYRVVSVLTVLHQDWLNGKEYKCKVSNKALPAPIEKTISKAKGQPREPQVYTLPPSREEMTKNQVSLTCLVKGFYPSDIAVEWESNGQPENNYKTTPPVLDSDGSFFLYSKLTVDKSRWQQGNVFSCSVMHEALHNHYTQKSLSLSPGK

SEQ ID NO: 16982 - protein, 122 aa, Artificial Sequence; identical to SEQ ID NO: 11558
  Description of Artificial Sequence: Synthetic polypeptide
  VH of XENP018156

SEQ ID NO: 16983 - protein, 5 aa, Artificial Sequence
  Description of Artificial Sequence: Synthetic peptide
  XENP018156 vhCDR1
NYWMN

SEQ ID NO: 16984 - protein, 19 aa, Artificial Sequence
  Description of Artificial Sequence: Synthetic peptide
  XENP018156 vhCDR2
AIRLKSNNYATHYAEPVKG

SEQ ID NO: 16985 - protein, 11 aa, Artificial Sequence
  Description of Artificial Sequence: Synthetic peptide
  XENP018156 vhCDR3
YYGNYGGYFDV

SEQ ID NO: 16986 - protein, 214 aa, Artificial Sequence; identical to SEQ ID NO: 16226
  Description of Artificial Sequence: Synthetic polypeptide
  XENP018156 1G6_H1.59_L1_IgG1_PVA_/S267K Light Chain

SEQ ID NO: 16987 - protein, 107 aa, Artificial Sequence; identical to SEQ ID NO: 10923
  Description of Artificial Sequence: Synthetic polypeptide
  VL of XENP018156

SEQ ID NO: 16988 - protein, 11 aa, Artificial Sequence
  Description of Artificial Sequence: Synthetic peptide
  XENP018156 vlCDR1
RASQSVSNDVA

SEQ ID NO: 16989 - protein, 7 aa, Artificial Sequence
  Description of Artificial Sequence: Synthetic peptide
  XENP018156 vlCDR2
YASHRYT

SEQ ID NO: 16990 - protein, 9 aa, Artificial Sequence
  Description of Artificial Sequence: Synthetic peptide
  XENP018156 vlCDR3
QQDYSSPRT

SEQ ID NO: 16991 - protein, 451 aa, Artificial Sequence
  Description of Artificial Sequence: Synthetic polypeptide
  XENP018157 1G6_H1.60_L1_IgG1_PVA_/S267K Heavy Chain
EVQLVESGGGLVKPGGSLRLSCAASGFTFSNYWMNWVRQAPGKGLEWVGGIRLKSNNYATHYAEPVKGRFTISRDDSKSTVYLQMNSLKTEDTAVYYCTRYYGNYGGYFDVWGAGTLVTVSSASTKGPSVFPLAPSSKSTSGGTAALGCLVKDYFPEPVTVSWNSGALTSGVHTFPAVLQSSGLYSLSSVVTVPSSSLGTQTYICNVNHKPSNTKVDKKVEPKSCDKTHTCPPCPAPPVAGPSVFLFPPKPKDTLMISRTPEVTCVVVDVKHEDPEVKFNWYVDGVEVHNAKTKPREEQYNSTYRVVSVLTVLHQDWLNGKEYKCKVSNKALPAPIEKTISKAKGQPREPQVYTLPPSREEMTKNQVSLTCLVKGFYPSDIAVEWESNGQPENNYKTTPPVLDSDGSFFLYSKLTVDKSRWQQGNVFSCSVMHEALHNHYTQKSLSLSPGK

SEQ ID NO: 16992 - protein, 122 aa, Artificial Sequence; identical to SEQ ID NO: 11567
  Description of Artificial Sequence: Synthetic polypeptide
  VH of XENP018157

SEQ ID NO: 16993 - protein, 5 aa, Artificial Sequence
  Description of Artificial Sequence: Synthetic peptide
  XENP018157 vhCDR1
NYWMN

SEQ ID NO: 16994 - protein, 19 aa, Artificial Sequence
  Description of Artificial Sequence: Synthetic peptide
  XENP018157 vhCDR2
GIRLKSNNYATHYAEPVKG

SEQ ID NO: 16995 - protein, 11 aa, Artificial Sequence
  Description of Artificial Sequence: Synthetic peptide
  XENP018157 vhCDR3
YYGNYGGYFDV

SEQ ID NO: 16996 - protein, 214 aa, Artificial Sequence; identical to SEQ ID NO: 16226
  Description of Artificial Sequence: Synthetic polypeptide
  XENP018157 1G6_H1.60_L1_IgG1_PVA_/S267K Light Chain

SEQ ID NO: 16997 - protein, 107 aa, Artificial Sequence; identical to SEQ ID NO: 10923
  Description of Artificial Sequence: Synthetic polypeptide
  VL of XENP018157

SEQ ID NO: 16998 - protein, 11 aa, Artificial Sequence
  Description of Artificial Sequence: Synthetic peptide
  XENP018157 vlCDR1
RASQSVSNDVA

SEQ ID NO: 16999 - protein, 7 aa, Artificial Sequence
  Description of Artificial Sequence: Synthetic peptide
  XENP018157 vlCDR2
YASHRYT

SEQ ID NO: 17000 - protein, 9 aa, Artificial Sequence
  Description of Artificial Sequence: Synthetic peptide
  XENP018157 vlCDR3
QQDYSSPRT

SEQ ID NO: 17001 - protein, 451 aa, Artificial Sequence
  Description of Artificial Sequence: Synthetic polypeptide
  XENP018158 1G6_H1.61_L1_IgG1_PVA_/S267K Heavy Chain
EVQLVESGGGLVKPGGSLRLSCAASGFTFSNYWMNWVRQAPGKGLEWVGYIRLKSNNYATHYAEPVKGRFTISRDDSKSTVYLQMNSLKTEDTAVYYCTRYYGNYGGYFDVWGAGTLVTVSSASTKGPSVFPLAPSSKSTSGGTAALGCLVKDYFPEPVTVSWNSGALTSGVHTFPAVLQSSGLYSLSSVVTVPSSSLGTQTYICNVNHKPSNTKVDKKVEPKSCDKTHTCPPCPAPPVAGPSVFLFPPKPKDTLMISRTPEVTCVVVDVKHEDPEVKFNWYVDGVEVHNAKTKPREEQYNSTYRVVSVLTVLHQDWLNGKEYKCKVSNKALPAPIEKTISKAKGQPREPQVYTLPPSREEMTKNQVSLTCLVKGFYPSDIAVEWESNGQPENNYKTTPPVLDSDGSFFLYSKLTVDKSRWQQGNVFSCSVMHEALHNHYTQKSLSLSPGK

SEQ ID NO: 17002 - protein, 122 aa, Artificial Sequence; identical to SEQ ID NO: 11576
  Description of Artificial Sequence: Synthetic polypeptide
  VH of XENP018158

SEQ ID NO: 17003 - protein, 5 aa, Artificial Sequence
  Description of Artificial Sequence: Synthetic peptide
  XENP018158 vhCDR1
NYWMN

SEQ ID NO: 17004 - protein, 19 aa, Artificial Sequence
  Description of Artificial Sequence: Synthetic peptide
  XENP018158 vhCDR2
YIRLKSNNYATHYAEPVKG

SEQ ID NO: 17005 - protein, 11 aa, Artificial Sequence
  Description of Artificial Sequence: Synthetic peptide
  XENP018158 vhCDR3
YYGNYGGYFDV

SEQ ID NO: 17006 - protein, 214 aa, Artificial Sequence; identical to SEQ ID NO: 16226
  Description of Artificial Sequence: Synthetic polypeptide
  XENP018158 1G6_H1.61_L1_IgG1_PVA_/S267K Light Chain

SEQ ID NO: 17007 - protein, 107 aa, Artificial Sequence; identical to SEQ ID NO: 10923
  Description of Artificial Sequence: Synthetic polypeptide
  VL of XENP018158

SEQ ID NO: 17008 - protein, 11 aa, Artificial Sequence
  Description of Artificial Sequence: Synthetic peptide
  XENP018158 vlCDR1
RASQSVSNDVA

SEQ ID NO: 17009 - protein, 7 aa, Artificial Sequence
  Description of Artificial Sequence: Synthetic peptide
  XENP018158 vlCDR2
YASHRYT

SEQ ID NO: 17010 - protein, 9 aa, Artificial Sequence
  Description of Artificial Sequence: Synthetic peptide
  XENP018158 vlCDR3
QQDYSSPRT

SEQ ID NO: 17011 - protein, 451 aa, Artificial Sequence
  Description of Artificial Sequence: Synthetic polypeptide
  XENP018159 1G6_H1.62_L1_IgG1_PVA_/S267K Heavy Chain
EVQLVESGGGLVKPGGSLRLSCAASGFTFSNYWMNWVRQAPGKGLEWVGIIRLKSNNYATHYAEPVKGRFTISRDDSKSTVYLQMNSLKTEDTAVYYCTRYYGNYGGYFDVWGAGTLVTVSSASTKGPSVFPLAPSSKSTSGGTAALGCLVKDYFPEPVTVSWNSGALTSGVHTFPAVLQSSGLYSLSSVVTVPSSSLGTQTYICNVNHKPSNTKVDKKVEPKSCDKTHTCPPCPAPPVAGPSVFLFPPKPKDTLMISRTPEVTCVVVDVKHEDPEVKFNWYVDGVEVHNAKTKPREEQYNSTYRVVSVLTVLHQDWLNGKEYKCKVSNKALPAPIEKTISKAKGQPREPQVYTLPPSREEMTKNQVSLTCLVKGFYPSDIAVEWESNGQPENNYKTTPPVLDSDGSFFLYSKLTVDKSRWQQGNVFSCSVMHEALHNHYTQKSLSLSPGK

SEQ ID NO: 17012 - protein, 122 aa, Artificial Sequence; identical to SEQ ID NO: 11585
  Description of Artificial Sequence: Synthetic polypeptide
  VH of XENP018159

SEQ ID NO: 17013 - protein, 5 aa, Artificial Sequence
  Description of Artificial Sequence: Synthetic peptide
  XENP018159 vhCDR1
NYWMN

SEQ ID NO: 17014 - protein, 19 aa, Artificial Sequence
  Description of Artificial Sequence: Synthetic peptide
  XENP018159 vhCDR2
IIRLKSNNYATHYAEPVKG

SEQ ID NO: 17015 - protein, 11 aa, Artificial Sequence
  Description of Artificial Sequence: Synthetic peptide
  XENP018159 vhCDR3
YYGNYGGYFDV

SEQ ID NO: 17016 - protein, 214 aa, Artificial Sequence; identical to SEQ ID NO: 16226
  Description of Artificial Sequence: Synthetic polypeptide
  XENP018159 1G6_H1.62_L1_IgG1_PVA_/S267K Light Chain

SEQ ID NO: 17017 - protein, 107 aa, Artificial Sequence; identical to SEQ ID NO: 10923
  Description of Artificial Sequence: Synthetic polypeptide
  VL of XENP018159

SEQ ID NO: 17018 - protein, 11 aa, Artificial Sequence
  Description of Artificial Sequence: Synthetic peptide
  XENP018159 vlCDR1
RASQSVSNDVA

SEQ ID NO: 17019 - protein, 7 aa, Artificial Sequence
  Description of Artificial Sequence: Synthetic peptide
  XENP018159 vlCDR2
YASHRYT

SEQ ID NO: 17020 - protein, 9 aa, Artificial Sequence
  Description of Artificial Sequence: Synthetic peptide
  XENP018159 vlCDR3
QQDYSSPRT

SEQ ID NO: 17021 - protein, 451 aa, Artificial Sequence
  Description of Artificial Sequence: Synthetic polypeptide
  XENP018160 1G6_H1.63_L1_IgG1_PVA_/S267K Heavy Chain
EVQLVESGGGLVKPGGSLRLSCAASGFTFSNYWMNWVRQAPGKGLEWVGEVRLKSNNYATHYAEPVKGRFTISRDDSKSTVYLQMNSLKTEDTAVYYCTRYYGNYGGYFDVWGAGTLVTVSSASTKGPSVFPLAPSSKSTSGGTAALGCLVKDYFPEPVTVSWNSGALTSGVHTFPAVLQSSGLYSLSSVVTVPSSSLGTQTYICNVNHKPSNTKVDKKVEPKSCDKTHTCPPCPAPPVAGPSVFLFPPKPKDTLMISRTPEVTCVVVDVKHEDPEVKFNWYVDGVEVHNAKTKPREEQYNSTYRVVSVLTVLHQDWLNGKEYKCKVSNKALPAPIEKTISKAKGQPREPQVYTLPPSREEMTKNQVSLTCLVKGFYPSDIAVEWESNGQPENNYKTTPPVLDSDGSFFLYSKLTVDKSRWQQGNVFSCSVMHEALHNHYTQKSLSLSPGK

SEQ ID NO: 17022 - protein, 122 aa, Artificial Sequence; identical to SEQ ID NO: 11594
  Description of Artificial Sequence: Synthetic polypeptide
  VH of XENP018160

SEQ ID NO: 17023 - protein, 5 aa, Artificial Sequence
  Description of Artificial Sequence: Synthetic peptide
  XENP018160 vhCDR1
NYWMN

SEQ ID NO: 17024 - protein, 19 aa, Artificial Sequence
  Description of Artificial Sequence: Synthetic peptide
  XENP018160 vhCDR2
EVRLKSNNYATHYAEPVKG

SEQ ID NO: 17025 - protein, 11 aa, Artificial Sequence
  Description of Artificial Sequence: Synthetic peptide
  XENP018160 vhCDR3
YYGNYGGYFDV

SEQ ID NO: 17026 - protein, 214 aa, Artificial Sequence; identical to SEQ ID NO: 16226
  Description of Artificial Sequence: Synthetic polypeptide
  XENP018160 1G6_H1.63_L1_IgG1_PVA_/S267K Light Chain

SEQ ID NO: 17027 - protein, 107 aa, Artificial Sequence; identical to SEQ ID NO: 10923
  Description of Artificial Sequence: Synthetic polypeptide
  VL of XENP018160

SEQ ID NO: 17028 - protein, 11 aa, Artificial Sequence
  Description of Artificial Sequence: Synthetic peptide
  XENP018160 vlCDR1
RASQSVSNDVA

SEQ ID NO: 17029 - protein, 7 aa, Artificial Sequence
  Description of Artificial Sequence: Synthetic peptide
  XENP018160 vlCDR2
YASHRYT

SEQ ID NO: 17030 - protein, 9 aa, Artificial Sequence
  Description of Artificial Sequence: Synthetic peptide
  XENP018160 vlCDR3
QQDYSSPRT

SEQ ID NO: 17031 - protein, 451 aa, Artificial Sequence
  Description of Artificial Sequence: Synthetic polypeptide
  XENP018161 1G6_H1.64_L1_IgG1_PVA_/S267K Heavy Chain
EVQLVESGGGLVKPGGSLRLSCAASGFTFSNYWMNWVRQAPGKGLEWVGEITLKSNNYATHYAEPVKGRFTISRDDSKSTVYLQMNSLKTEDTAVYYCTRYYGNYGGYFDVWGAGTLVTVSSASTKGPSVFPLAPSSKSTSGGTAALGCLVKDYFPEPVTVSWNSGALTSGVHTFPAVLQSSGLYSLSSVVTVPSSSLGTQTYICNVNHKPSNTKVDKKVEPKSCDKTHTCPPCPAPPVAGPSVFLFPPKPKDTLMISRTPEVTCVVVDVKHEDPEVKFNWYVDGVEVHNAKTKPREEQYNSTYRVVSVLTVLHQDWLNGKEYKCKVSNKALPAPIEKTISKAKGQPREPQVYTLPPSREEMTKNQVSLTCLVKGFYPSDIAVEWESNGQPENNYKTTPPVLDSDGSFFLYSKLTVDKSRWQQGNVFSCSVMHEALHNHYTQKSLSLSPGK

SEQ ID NO: 17032 - protein, 122 aa, Artificial Sequence; identical to SEQ ID NO: 11603
  Description of Artificial Sequence: Synthetic polypeptide
  VH of XENP018161

SEQ ID NO: 17033 - protein, 5 aa, Artificial Sequence
  Description of Artificial Sequence: Synthetic peptide
  XENP018161 vhCDR1
NYWMN

SEQ ID NO: 17034 - protein, 19 aa, Artificial Sequence
  Description of Artificial Sequence: Synthetic peptide
  XENP018161 vhCDR2
EITLKSNNYATHYAEPVKG

SEQ ID NO: 17035 - protein, 11 aa, Artificial Sequence
  Description of Artificial Sequence: Synthetic peptide
  XENP018161 vhCDR3
YYGNYGGYFDV

SEQ ID NO: 17036 - protein, 214 aa, Artificial Sequence; identical to SEQ ID NO: 16226
  Description of Artificial Sequence: Synthetic polypeptide
  XENP018161 1G6_H1.64_L1_IgG1_PVA_/S267K Light Chain

SEQ ID NO: 17037 - protein, 107 aa, Artificial Sequence; identical to SEQ ID NO: 10923
  Description of Artificial Sequence: Synthetic polypeptide
  VL of XENP018161

SEQ ID NO: 17038 - protein, 11 aa, Artificial Sequence
  Description of Artificial Sequence: Synthetic peptide
  XENP018161 vlCDR1
RASQSVSNDVA

SEQ ID NO: 17039 - protein, 7 aa, Artificial Sequence
  Description of Artificial Sequence: Synthetic peptide
  XENP018161 vlCDR2
YASHRYT

SEQ ID NO: 17040 - protein, 9 aa, Artificial Sequence
  Description of Artificial Sequence: Synthetic peptide
  XENP018161 vlCDR3
QQDYSSPRT

SEQ ID NO: 17041 - protein, 451 aa, Artificial Sequence
  Description of Artificial Sequence: Synthetic polypeptide
  XENP018162 1G6_H1.65_L1_IgG1_PVA_/S267K Heavy Chain
EVQLVESGGGLVKPGGSLRLSCAASGFTFSNYWMNWVRQAPGKGLEWVGEIKLKSNNYATHYAEPVKGRFTISRDDSKSTVYLQMNSLKTEDTAVYYCTRYYGNYGGYFDVWGAGTLVTVSSASTKGPSVFPLAPSSKSTSGGTAALGCLVKDYFPEPVTVSWNSGALTSGVHTFPAVLQSSGLYSLSSVVTVPSSSLGTQTYICNVNHKPSNTKVDKKVEPKSCDKTHTCPPCPAPPVAGPSVFLFPPKPKDTLMISRTPEVTCVVVDVKHEDPEVKFNWYVDGVEVHNAKTKPREEQYNSTYRVVSVLTVLHQDWLNGKEYKCKVSNKALPAPIEKTISKAKGQPREPQVYTLPPSREEMTKNQVSLTCLVKGFYPSDIAVEWESNGQPENNYKTTPPVLDSDGSFFLYSKLTVDKSRWQQGNVFSCSVMHEALHNHYTQKSLSLSPGK

SEQ ID NO: 17042 - protein, 122 aa, Artificial Sequence; identical to SEQ ID NO: 11612
  Description of Artificial Sequence: Synthetic polypeptide
  VH of XENP018162

SEQ ID NO: 17043 - protein, 5 aa, Artificial Sequence
  Description of Artificial Sequence: Synthetic peptide
  XENP018162 vhCDR1
NYWMN

SEQ ID NO: 17044 - protein, 19 aa, Artificial Sequence
  Description of Artificial Sequence: Synthetic peptide
  XENP018162 vhCDR2
EIKLKSNNYATHYAEPVKG

SEQ ID NO: 17045 - protein, 11 aa, Artificial Sequence
  Description of Artificial Sequence: Synthetic peptide
  XENP018162 vhCDR3
YYGNYGGYFDV

SEQ ID NO: 17046 - protein, 214 aa, Artificial Sequence; identical to SEQ ID NO: 16226
  Description of Artificial Sequence: Synthetic polypeptide
  XENP018162 1G6_H1.65_L1_IgG1_PVA_/S267K Light Chain

SEQ ID NO: 17047 - protein, 107 aa, Artificial Sequence; identical to SEQ ID NO: 10923
  Description of Artificial Sequence: Synthetic polypeptide
  VL of XENP018162

SEQ ID NO: 17048 - protein, 11 aa, Artificial Sequence
  Description of Artificial Sequence: Synthetic peptide
  XENP018162 vlCDR1
RASQSVSNDVA

SEQ ID NO: 17049 - protein, 7 aa, Artificial Sequence
  Description of Artificial Sequence: Synthetic peptide
  XENP018162 vlCDR2
YASHRYT

SEQ ID NO: 17050 - protein, 9 aa, Artificial Sequence
  Description of Artificial Sequence: Synthetic peptide
  XENP018162 vlCDR3
QQDYSSPRT

SEQ ID NO: 17051 - protein, 451 aa, Artificial Sequence
  Description of Artificial Sequence: Synthetic polypeptide
  XENP018163 1G6_H1.66_L1_IgG1_PVA_/S267K Heavy Chain
EVQLVESGGGLVKPGGSLRLSCAASGFTFSNYWMNWVRQAPGKGLEWVGEIELKSNNYATHYAEPVKGRFTISRDDSKSTVYLQMNSLKTEDTAVYYCTRYYGNYGGYFDVWGAGTLVTVSSASTKGPSVFPLAPSSKSTSGGTAALGCLVKDYFPEPVTVSWNSGALTSGVHTFPAVLQSSGLYSLSSVVTVPSSSLGTQTYICNVNHKPSNTKVDKKVEPKSCDKTHTCPPCPAPPVAGPSVFLFPPKPKDTLMISRTPEVTCVVVDVKHEDPEVKFNWYVDGVEVHNAKTKPREEQYNSTYRVVSVLTVLHQDWLNGKEYKCKVSNKALPAPIEKTISKAKGQPREPQVYTLPPSREEMTKNQVSLTCLVKGFYPSDIAVEWESNGQPENNYKTTPPVLDSDGSFFLYSKLTVDKSRWQQGNVFSCSVMHEALHNHYTQKSLSLSPGK

SEQ ID NO: 17052 - protein, 122 aa, Artificial Sequence; identical to SEQ ID NO: 11621
  Description of Artificial Sequence: Synthetic polypeptide
  VH of XENP018163

SEQ ID NO: 17053 - protein, 5 aa, Artificial Sequence
  Description of Artificial Sequence: Synthetic peptide
  XENP018163 vhCDR1
NYWMN

SEQ ID NO: 17054 - protein, 19 aa, Artificial Sequence
  Description of Artificial Sequence: Synthetic peptide
  XENP018163 vhCDR2
EIELKSNNYATHYAEPVKG

SEQ ID NO: 17055 - protein, 11 aa, Artificial Sequence
  Description of Artificial Sequence: Synthetic peptide
  XENP018163 vhCDR3
YYGNYGGYFDV

SEQ ID NO: 17056 - protein, 214 aa, Artificial Sequence; identical to SEQ ID NO: 16226
  Description of Artificial Sequence: Synthetic polypeptide
  XENP018163 1G6_H1.66_L1_IgG1_PVA_/S267K Light Chain

SEQ ID NO: 17057 - protein, 107 aa, Artificial Sequence; identical to SEQ ID NO: 10923
  Description of Artificial Sequence: Synthetic polypeptide
  VL of XENP018163

SEQ ID NO: 17058 - protein, 11 aa, Artificial Sequence
  Description of Artificial Sequence: Synthetic peptide
  XENP018163 vlCDR1
RASQSVSNDVA

SEQ ID NO: 17059 - protein, 7 aa, Artificial Sequence
  Description of Artificial Sequence: Synthetic peptide
  XENP018163 vlCDR2
YASHRYT

SEQ ID NO: 17060 - protein, 9 aa, Artificial Sequence
  Description of Artificial Sequence: Synthetic peptide
  XENP018163 vlCDR3
QQDYSSPRT

SEQ ID NO: 17061 - protein, 451 aa, Artificial Sequence
  Description of Artificial Sequence: Synthetic polypeptide
  XENP018164 1G6_H1.67_L1_IgG1_PVA_/S267K Heavy Chain
EVQLVESGGGLVKPGGSLRLSCAASGFTFSNYWMNWVRQAPGKGLEWVGEIDLKSNNYATHYAEPVKGRFTISRDDSKSTVYLQMNSLKTEDTAVYYCTRYYGNYGGYFDVWGAGTLVTVSSASTKGPSVFPLAPSSKSTSGGTAALGCLVKDYFPEPVTVSWNSGALTSGVHTFPAVLQSSGLYSLSSVVTVPSSSLGTQTYICNVNHKPSNTKVDKKVEPKSCDKTHTCPPCPAPPVAGPSVFLFPPKPKDTLMISRTPEVTCVVVDVKHEDPEVKFNWYVDGVEVHNAKTKPREEQYNSTYRVVSVLTVLHQDWLNGKEYKCKVSNKALPAPIEKTISKAKGQPREPQVYTLPPSREEMTKNQVSLTCLVKGFYPSDIAVEWESNGQPENNYKTTPPVLDSDGSFFLYSKLTVDKSRWQQGNVFSCSVMHEALHNHYTQKSLSLSPGK

SEQ ID NO: 17062 - protein, 122 aa, Artificial Sequence; identical to SEQ ID NO: 11630
  Description of Artificial Sequence: Synthetic polypeptide
  VH of XENP018164

SEQ ID NO: 17063 - protein, 5 aa, Artificial Sequence
  Description of Artificial Sequence: Synthetic peptide
  XENP018164 vhCDR1
NYWMN

SEQ ID NO: 17064 - protein, 19 aa, Artificial Sequence
  Description of Artificial Sequence: Synthetic peptide
  XENP018164 vhCDR2
EIDLKSNNYATHYAEPVKG

SEQ ID NO: 17065 - protein, 11 aa, Artificial Sequence
  Description of Artificial Sequence: Synthetic peptide
  XENP018164 vhCDR3
YYGNYGGYFDV

SEQ ID NO: 17066 - protein, 214 aa, Artificial Sequence; identical to SEQ ID NO: 16226
  Description of Artificial Sequence: Synthetic polypeptide
  XENP018164 1G6_H1.67_L1_IgG1_PVA_/S267K Light Chain

SEQ ID NO: 17067 - protein, 107 aa, Artificial Sequence; identical to SEQ ID NO: 10923
  Description of Artificial Sequence: Synthetic polypeptide
  VL of XENP018164

SEQ ID NO: 17068 - protein, 11 aa, Artificial Sequence
  Description of Artificial Sequence: Synthetic peptide
  XENP018164 vlCDR1
RASQSVSNDVA

SEQ ID NO: 17069 - protein, 7 aa, Artificial Sequence
  Description of Artificial Sequence: Synthetic peptide
  XENP018164 vlCDR2
YASHRYT

SEQ ID NO: 17070 - protein, 9 aa, Artificial Sequence
  Description of Artificial Sequence: Synthetic peptide
  XENP018164 vlCDR3
QQDYSSPRT

SEQ ID NO: 17071 - protein, 451 aa, Artificial Sequence
  Description of Artificial Sequence: Synthetic polypeptide
  XENP018165 1G6_H1.68_L1_IgG1_PVA_/S267K Heavy Chain
EVQLVESGGGLVKPGGSLRLSCAASGFTFSNYWMNWVRQAPGKGLEWVGEIHLKSNNYATHYAEPVKGRFTISRDDSKSTVYLQMNSLKTEDTAVYYCTRYYGNYGGYFDVWGAGTLVTVSSASTKGPSVFPLAPSSKSTSGGTAALGCLVKDYFPEPVTVSWNSGALTSGVHTFPAVLQSSGLYSLSSVVTVPSSSLGTQTYICNVNHKPSNTKVDKKVEPKSCDKTHTCPPCPAPPVAGPSVFLFPPKPKDTLMISRTPEVTCVVVDVKHEDPEVKFNWYVDGVEVHNAKTKPREEQYNSTYRVVSVLTVLHQDWLNGKEYKCKVSNKALPAPIEKTISKAKGQPREPQVYTLPPSREEMTKNQVSLTCLVKGFYPSDIAVEWESNGQPENNYKTTPPVLDSDGSFFLYSKLTVDKSRWQQGNVFSCSVMHEALHNHYTQKSLSLSPGK

SEQ ID NO: 17072 - protein, 122 aa, Artificial Sequence; identical to SEQ ID NO: 11639
  Description of Artificial Sequence: Synthetic polypeptide
  VH of XENP018165

SEQ ID NO: 17073 - protein, 5 aa, Artificial Sequence
  Description of Artificial Sequence: Synthetic peptide
  XENP018165 vhCDR1
NYWMN

SEQ ID NO: 17074 - protein, 19 aa, Artificial Sequence
  Description of Artificial Sequence: Synthetic peptide
  XENP018165 vhCDR2
EIHLKSNNYATHYAEPVKG

SEQ ID NO: 17075 - protein, 11 aa, Artificial Sequence
  Description of Artificial Sequence: Synthetic peptide
  XENP018165 vhCDR3
YYGNYGGYFDV

SEQ ID NO: 17076 - protein, 214 aa, Artificial Sequence; identical to SEQ ID NO: 16226
  Description of Artificial Sequence: Synthetic polypeptide
  XENP018165 1G6_H1.68_L1_IgG1_PVA_/S267K Light Chain

SEQ ID NO: 17077 - protein, 107 aa, Artificial Sequence; identical to SEQ ID NO: 10923
  Description of Artificial Sequence: Synthetic polypeptide
  VL of XENP018165

SEQ ID NO: 17078 - protein, 11 aa, Artificial Sequence
  Description of Artificial Sequence: Synthetic peptide
  XENP018165 vlCDR1
RASQSVSNDVA

SEQ ID NO: 17079 - protein, 7 aa, Artificial Sequence
  Description of Artificial Sequence: Synthetic peptide
  XENP018165 vlCDR2
YASHRYT

SEQ ID NO: 17080 - protein, 9 aa, Artificial Sequence
  Description of Artificial Sequence: Synthetic peptide
  XENP018165 vlCDR3
QQDYSSPRT

SEQ ID NO: 17081 - protein, 451 aa, Artificial Sequence
  Description of Artificial Sequence: Synthetic polypeptide
  XENP018166 1G6_H1.69_L1_IgG1_PVA_/S267K Heavy Chain
EVQLVESGGGLVKPGGSLRLSCAASGFTFSNYWMNWVRQAPGKGLEWVGEISLKSNNYATHYAEPVKGRFTISRDDSKSTVYLQMNSLKTEDTAVYYCTRYYGNYGGYFDVWGAGTLVTVSSASTKGPSVFPLAPSSKSTSGGTAALGCLVKDYFPEPVTVSWNSGALTSGVHTFPAVLQSSGLYSLSSVVTVPSSSLGTQTYICNVNHKPSNTKVDKKVEPKSCDKTHTCPPCPAPPVAGPSVFLFPPKPKDTLMISRTPEVTCVVVDVKHEDPEVKFNWYVDGVEVHNAKTKPREEQYNSTYRVVSVLTVLHQDWLNGKEYKCKVSNKALPAPIEKTISKAKGQPREPQVYTLPPSREEMTKNQVSLTCLVKGFYPSDIAVEWESNGQPENNYKTTPPVLDSDGSFFLYSKLTVDKSRWQQGNVFSCSVMHEALHNHYTQKSLSLSPGK

SEQ ID NO: 17082 - protein, 122 aa, Artificial Sequence; identical to SEQ ID NO: 11648
  Description of Artificial Sequence: Synthetic polypeptide
  VH of XENP018166

SEQ ID NO: 17083 - protein, 5 aa, Artificial Sequence
  Description of Artificial Sequence: Synthetic peptide
  XENP018166 vhCDR1
NYWMN

SEQ ID NO: 17084 - protein, 19 aa, Artificial Sequence
  Description of Artificial Sequence: Synthetic peptide
  XENP018166 vhCDR2
EISLKSNNYATHYAEPVKG

SEQ ID NO: 17085 - protein, 11 aa, Artificial Sequence
  Description of Artificial Sequence: Synthetic peptide
  XENP018166 vhCDR3
YYGNYGGYFDV

SEQ ID NO: 17086 - protein, 214 aa, Artificial Sequence; identical to SEQ ID NO: 16226
  Description of Artificial Sequence: Synthetic polypeptide
  XENP018166 1G6_H1.69_L1_IgG1_PVA_/S267K Light Chain

SEQ ID NO: 17087 - protein, 107 aa, Artificial Sequence; identical to SEQ ID NO: 10923
  Description of Artificial Sequence: Synthetic polypeptide
  VL of XENP018166

SEQ ID NO: 17088 - protein, 11 aa, Artificial Sequence
  Description of Artificial Sequence: Synthetic peptide
  XENP018166 vlCDR1
RASQSVSNDVA

SEQ ID NO: 17089 - protein, 7 aa, Artificial Sequence
  Description of Artificial Sequence: Synthetic peptide
  XENP018166 vlCDR2
YASHRYT

SEQ ID NO: 17090 - protein, 9 aa, Artificial Sequence
  Description of Artificial Sequence: Synthetic peptide
  XENP018166 vlCDR3
QQDYSSPRT

SEQ ID NO: 17091 - protein, 451 aa, Artificial Sequence
  Description of Artificial Sequence: Synthetic polypeptide
  XENP018167 1G6_H1.70_L1_IgG1_PVA_/S267K Heavy Chain
EVQLVESGGGLVKPGGSLRLSCAASGFTFSNYWMNWVRQAPGKGLEWVGEIGLKSNNYATHYAEPVKGRFTISRDDSKSTVYLQMNSLKTEDTAVYYCTRYYGNYGGYFDVWGAGTLVTVSSASTKGPSVFPLAPSSKSTSGGTAALGCLVKDYFPEPVTVSWNSGALTSGVHTFPAVLQSSGLYSLSSVVTVPSSSLGTQTYICNVNHKPSNTKVDKKVEPKSCDKTHTCPPCPAPPVAGPSVFLFPPKPKDTLMISRTPEVTCVVVDVKHEDPEVKFNWYVDGVEVHNAKTKPREEQYNSTYRVVSVLTVLHQDWLNGKEYKCKVSNKALPAPIEKTISKAKGQPREPQVYTLPPSREEMTKNQVSLTCLVKGFYPSDIAVEWESNGQPENNYKTTPPVLDSDGSFFLYSKLTVDKSRWQQGNVFSCSVMHEALHNHYTQKSLSLSPGK

SEQ ID NO: 17092 - protein, 122 aa, Artificial Sequence; identical to SEQ ID NO: 11657
  Description of Artificial Sequence: Synthetic polypeptide
  VH of XENP018167

SEQ ID NO: 17093 - protein, 5 aa, Artificial Sequence
  Description of Artificial Sequence: Synthetic peptide
  XENP018167 vhCDR1
NYWMN

SEQ ID NO: 17094 - protein, 19 aa, Artificial Sequence
  Description of Artificial Sequence: Synthetic peptide
  XENP018167 vhCDR2
EIGLKSNNYATHYAEPVKG

SEQ ID NO: 17095 - protein, 11 aa, Artificial Sequence
  Description of Artificial Sequence: Synthetic peptide
  XENP018167 vhCDR3
YYGNYGGYFDV

SEQ ID NO: 17096 - protein, 214 aa, Artificial Sequence; identical to SEQ ID NO: 16226
  Description of Artificial Sequence: Synthetic polypeptide
  XENP018167 1G6_H1.70_L1_IgG1_PVA_/S267K Light Chain

SEQ ID NO: 17097 - protein, 107 aa, Artificial Sequence; identical to SEQ ID NO: 10923
  Description of Artificial Sequence: Synthetic polypeptide
  VL of XENP018167

SEQ ID NO: 17098 - protein, 11 aa, Artificial Sequence
  Description of Artificial Sequence: Synthetic peptide
  XENP018167 vlCDR1
RASQSVSNDVA

SEQ ID NO: 17099 - protein, 7 aa, Artificial Sequence
  Description of Artificial Sequence: Synthetic peptide
  XENP018167 vlCDR2
YASHRYT

SEQ ID NO: 17100 - protein, 9 aa, Artificial Sequence
  Description of Artificial Sequence: Synthetic peptide
  XENP018167 vlCDR3
QQDYSSPRT

SEQ ID NO: 17101 - protein, 451 aa, Artificial Sequence
  Description of Artificial Sequence: Synthetic polypeptide
  XENP018168 1G6_H1.71_L1_IgG1_PVA_/S267K Heavy Chain
EVQLVESGGGLVKPGGSLRLSCAASGFTFSNYWMNWVRQAPGKGLEWVGEIYLKSNNYATHYAEPVKGRFTISRDDSKSTVYLQMNSLKTEDTAVYYCTRYYGNYGGYFDVWGAGTLVTVSSASTKGPSVFPLAPSSKSTSGGTAALGCLVKDYFPEPVTVSWNSGALTSGVHTFPAVLQSSGLYSLSSVVTVPSSSLGTQTYICNVNHKPSNTKVDKKVEPKSCDKTHTCPPCPAPPVAGPSVFLFPPKPKDTLMISRTPEVTCVVVDVKHEDPEVKFNWYVDGVEVHNAKTKPREEQYNSTYRVVSVLTVLHQDWLNGKEYKCKVSNKALPAPIEKTISKAKGQPREPQVYTLPPSREEMTKNQVSLTCLVKGFYPSDIAVEWESNGQPENNYKTTPPVLDSDGSFFLYSKLTVDKSRWQQGNVFSCSVMHEALHNHYTQKSLSLSPGK

SEQ ID NO: 17102 - protein, 122 aa, Artificial Sequence; identical to SEQ ID NO: 11666
  Description of Artificial Sequence: Synthetic polypeptide
  VH of XENP018168

SEQ ID NO: 17103 - protein, 5 aa, Artificial Sequence
  Description of Artificial Sequence: Synthetic peptide
  XENP018168 vhCDR1
NYWMN

SEQ ID NO: 17104 - protein, 19 aa, Artificial Sequence
  Description of Artificial Sequence: Synthetic peptide
  XENP018168 vhCDR2
EIYLKSNNYATHYAEPVKG

SEQ ID NO: 17105 - protein, 11 aa, Artificial Sequence
  Description of Artificial Sequence: Synthetic peptide
  XENP018168 vhCDR3
YYGNYGGYFDV

SEQ ID NO: 17106 - protein, 214 aa, Artificial Sequence; identical to SEQ ID NO: 16226
  Description of Artificial Sequence: Synthetic polypeptide
  XENP018168 1G6_H1.71_L1_IgG1_PVA_/S267K Light Chain

SEQ ID NO: 17107 - protein, 107 aa, Artificial Sequence; identical to SEQ ID NO: 10923
  Description of Artificial Sequence: Synthetic polypeptide
  VL of XENP018168

SEQ ID NO: 17108 - protein, 11 aa, Artificial Sequence
  Description of Artificial Sequence: Synthetic peptide
  XENP018168 vlCDR1
RASQSVSNDVA

SEQ ID NO: 17109 - protein, 7 aa, Artificial Sequence
  Description of Artificial Sequence: Synthetic peptide
  XENP018168 vlCDR2
YASHRYT

SEQ ID NO: 17110 - protein, 9 aa, Artificial Sequence
  Description of Artificial Sequence: Synthetic peptide
  XENP018168 vlCDR3
QQDYSSPRT

SEQ ID NO: 17111 - protein, 451 aa, Artificial Sequence
  Description of Artificial Sequence: Synthetic polypeptide
  XENP018169 1G6_H1.72_L1_IgG1_PVA_/S267K Heavy Chain
EVQLVESGGGLVKPGGSLRLSCAASGFTFSNYWMNWVRQAPGKGLEWVGEIILKSNNYATHYAEPVKGRFTISRDDSKSTVYLQMNSLKTEDTAVYYCTRYYGNYGGYFDVWGAGTLVTVSSASTKGPSVFPLAPSSKSTSGGTAALGCLVKDYFPEPVTVSWNSGALTSGVHTFPAVLQSSGLYSLSSVVTVPSSSLGTQTYICNVNHKPSNTKVDKKVEPKSCDKTHTCPPCPAPPVAGPSVFLFPPKPKDTLMISRTPEVTCVVVDVKHEDPEVKFNWYVDGVEVHNAKTKPREEQYNSTYRVVSVLTVLHQDWLNGKEYKCKVSNKALPAPIEKTISKAKGQPREPQVYTLPPSREEMTKNQVSLTCLVKGFYPSDIAVEWESNGQPENNYKTTPPVLDSDGSFFLYSKLTVDKSRWQQGNVFSCSVMHEALHNHYTQKSLSLSPGK

SEQ ID NO: 17112 - protein, 122 aa, Artificial Sequence; identical to SEQ ID NO: 11675
  Description of Artificial Sequence: Synthetic polypeptide
  VH of XENP018169

SEQ ID NO: 17113 - protein, 5 aa, Artificial Sequence
  Description of Artificial Sequence: Synthetic peptide
  XENP018169 vhCDR1
NYWMN

SEQ ID NO: 17114 - protein, 19 aa, Artificial Sequence
  Description of Artificial Sequence: Synthetic peptide
  XENP018169 vhCDR2
EIILKSNNYATHYAEPVKG

SEQ ID NO: 17115 - protein, 11 aa, Artificial Sequence
  Description of Artificial Sequence: Synthetic peptide
  XENP018169 vhCDR3
YYGNYGGYFDV

SEQ ID NO: 17116 - protein, 214 aa, Artificial Sequence; identical to SEQ ID NO: 16226
  Description of Artificial Sequence: Synthetic polypeptide
  XENP018169 1G6_H1.72_L1_IgG1_PVA_/S267K Light Chain

SEQ ID NO: 17117 - protein, 107 aa, Artificial Sequence; identical to SEQ ID NO: 10923
  Description of Artificial Sequence: Synthetic polypeptide
  VL of XENP018169

SEQ ID NO: 17118 - protein, 11 aa, Artificial Sequence
  Description of Artificial Sequence: Synthetic peptide
  XENP018169 vlCDR1
RASQSVSNDVA

SEQ ID NO: 17119 - protein, 7 aa, Artificial Sequence
  Description of Artificial Sequence: Synthetic peptide
  XENP018169 vlCDR2
YASHRYT

SEQ ID NO: 17120 - protein, 9 aa, Artificial Sequence
  Description of Artificial Sequence: Synthetic peptide
  XENP018169 vlCDR3
QQDYSSPRT

SEQ ID NO: 17121 - protein, 451 aa, Artificial Sequence
  Description of Artificial Sequence: Synthetic polypeptide
  XENP018170 1G6_H1.73_L1_IgG1_PVA_/S267K Heavy Chain
EVQLVESGGGLVKPGGSLRLSCAASGFTFSNYWMNWVRQAPGKGLEWVGEIWLKSNNYATHYAEPVKGRFTISRDDSKSTVYLQMNSLKTEDTAVYYCTRYYGNYGGYFDVWGAGTLVTVSSASTKGPSVFPLAPSSKSTSGGTAALGCLVKDYFPEPVTVSWNSGALTSGVHTFPAVLQSSGLYSLSSVVTVPSSSLGTQTYICNVNHKPSNTKVDKKVEPKSCDKTHTCPPCPAPPVAGPSVFLFPPKPKDTLMISRTPEVTCVVVDVKHEDPEVKFNWYVDGVEVHNAKTKPREEQYNSTYRVVSVLTVLHQDWLNGKEYKCKVSNKALPAPIEKTISKAKGQPREPQVYTLPPSREEMTKNQVSLTCLVKGFYPSDIAVEWESNGQPENNYKTTPPVLDSDGSFFLYSKLTVDKSRWQQGNVFSCSVMHEALHNHYTQKSLSLSPGK

SEQ ID NO: 17122 - protein, 122 aa, Artificial Sequence; identical to SEQ ID NO: 11684
  Description of Artificial Sequence: Synthetic polypeptide
  VH of XENP018170

SEQ ID NO: 17123 - protein, 5 aa, Artificial Sequence
  Description of Artificial Sequence: Synthetic peptide
  XENP018170 vhCDR1
NYWMN

SEQ ID NO: 17124 - protein, 19 aa, Artificial Sequence
  Description of Artificial Sequence: Synthetic peptide
  XENP018170 vhCDR2
EIWLKSNNYATHYAEPVKG

SEQ ID NO: 17125 - protein, 11 aa, Artificial Sequence
  Description of Artificial Sequence: Synthetic peptide
  XENP018170 vhCDR3
YYGNYGGYFDV

SEQ ID NO: 17126 - protein, 214 aa, Artificial Sequence; identical to SEQ ID NO: 16226
  Description of Artificial Sequence: Synthetic polypeptide
  XENP018170 1G6_H1.73_L1_IgG1_PVA_/S267K Light Chain

SEQ ID NO: 17127 - protein, 107 aa, Artificial Sequence; identical to SEQ ID NO: 10923
  Description of Artificial Sequence: Synthetic polypeptide
  VL of XENP018170

SEQ ID NO: 17128 - protein, 11 aa, Artificial Sequence
  Description of Artificial Sequence: Synthetic peptide
  XENP018170 vlCDR1
RASQSVSNDVA

SEQ ID NO: 17129 - protein, 7 aa, Artificial Sequence
  Description of Artificial Sequence: Synthetic peptide
  XENP018170 vlCDR2
YASHRYT

SEQ ID NO: 17130 - protein, 9 aa, Artificial Sequence
  Description of Artificial Sequence: Synthetic peptide
  XENP018170 vlCDR3
QQDYSSPRT

SEQ ID NO: 17131 - protein, 451 aa, Artificial Sequence
  Description of Artificial Sequence: Synthetic polypeptide
  XENP018171 1G6_H1.74_L1_IgG1_PVA_/S267K Heavy Chain
EVQLVESGGGLVKPGGSLRLSCAASGFTFSNYWMNWVRQAPGKGLEWVGEIRIKSNNYATHYAEPVKGRFTISRDDSKSTVYLQMNSLKTEDTAVYYCTRYYGNYGGYFDVWGAGTLVTVSSASTKGPSVFPLAPSSKSTSGGTAALGCLVKDYFPEPVTVSWNSGALTSGVHTFPAVLQSSGLYSLSSVVTVPSSSLGTQTYICNVNHKPSNTKVDKKVEPKSCDKTHTCPPCPAPPVAGPSVFLFPPKPKDTLMISRTPEVTCVVVDVKHEDPEVKFNWYVDGVEVHNAKTKPREEQYNSTYRVVSVLTVLHQDWLNGKEYKCKVSNKALPAPIEKTISKAKGQPREPQVYTLPPSREEMTKNQVSLTCLVKGFYPSDIAVEWESNGQPENNYKTTPPVLDSDGSFFLYSKLTVDKSRWQQGNVFSCSVMHEALHNHYTQKSLSLSPGK

SEQ ID NO: 17132 - protein, 122 aa, Artificial Sequence; identical to SEQ ID NO: 11693
  Description of Artificial Sequence: Synthetic polypeptide
  VH of XENP018171

SEQ ID NO: 17133 - protein, 5 aa, Artificial Sequence
  Description of Artificial Sequence: Synthetic peptide
  XENP018171 vhCDR1
NYWMN

SEQ ID NO: 17134 - protein, 19 aa, Artificial Sequence
  Description of Artificial Sequence: Synthetic peptide
  XENP018171 vhCDR2
EIRIKSNNYATHYAEPVKG

SEQ ID NO: 17135 - protein, 11 aa, Artificial Sequence
  Description of Artificial Sequence: Synthetic peptide
  XENP018171 vhCDR3
YYGNYGGYFDV

SEQ ID NO: 17136 - protein, 214 aa, Artificial Sequence; identical to SEQ ID NO: 16226
  Description of Artificial Sequence: Synthetic polypeptide
  XENP018171 1G6_H1.74_L1_IgG1_PVA_/S267K Light Chain

SEQ ID NO: 17137 - protein, 107 aa, Artificial Sequence; identical to SEQ ID NO: 10923
  Description of Artificial Sequence: Synthetic polypeptide
  VL of XENP018171

SEQ ID NO: 17138 - protein, 11 aa, Artificial Sequence
  Description of Artificial Sequence: Synthetic peptide
  XENP018171 vlCDR1
RASQSVSNDVA

SEQ ID NO: 17139 - protein, 7 aa, Artificial Sequence
  Description of Artificial Sequence: Synthetic peptide
  XENP018171 vlCDR2
YASHRYT

SEQ ID NO: 17140 - protein, 9 aa, Artificial Sequence
  Description of Artificial Sequence: Synthetic peptide
  XENP018171 vlCDR3
QQDYSSPRT

SEQ ID NO: 17141 - protein, 451 aa, Artificial Sequence
  Description of Artificial Sequence: Synthetic polypeptide
  XENP018172 1G6_H1.75_L1_IgG1_PVA_/S267K Heavy Chain
EVQLVESGGGLVKPGGSLRLSCAASGFTFSNYWMNWVRQAPGKGLEWVGEIRFKSNNYATHYAEPVKGRFTISRDDSKSTVYLQMNSLKTEDTAVYYCTRYYGNYGGYFDVWGAGTLVTVSSASTKGPSVFPLAPSSKSTSGGTAALGCLVKDYFPEPVTVSWNSGALTSGVHTFPAVLQSSGLYSLSSVVTVPSSSLGTQTYICNVNHKPSNTKVDKKVEPKSCDKTHTCPPCPAPPVAGPSVFLFPPKPKDTLMISRTPEVTCVVVDVKHEDPEVKFNWYVDGVEVHNAKTKPREEQYNSTYRVVSVLTVLHQDWLNGKEYKCKVSNKALPAPIEKTISKAKGQPREPQVYTLPPSREEMTKNQVSLTCLVKGFYPSDIAVEWESNGQPENNYKTTPPVLDSDGSFFLYSKLTVDKSRWQQGNVFSCSVMHEALHNHYTQKSLSLSPGK

SEQ ID NO: 17142 - protein, 122 aa, Artificial Sequence; identical to SEQ ID NO: 11702
  Description of Artificial Sequence: Synthetic polypeptide
  VH of XENP018172

SEQ ID NO: 17143 - protein, 5 aa, Artificial Sequence
  Description of Artificial Sequence: Synthetic peptide
  XENP018172 vhCDR1
NYWMN

SEQ ID NO: 17144 - protein, 19 aa, Artificial Sequence
  Description of Artificial Sequence: Synthetic peptide
  XENP018172 vhCDR2
EIRFKSNNYATHYAEPVKG

SEQ ID NO: 17145 - protein, 11 aa, Artificial Sequence
  Description of Artificial Sequence: Synthetic peptide
  XENP018172 vhCDR3
YYGNYGGYFDV

SEQ ID NO: 17146 - protein, 214 aa, Artificial Sequence; identical to SEQ ID NO: 16226
  Description of Artificial Sequence: Synthetic polypeptide
  XENP018172 1G6_H1.75_L1_IgG1_PVA_/S267K Light Chain

SEQ ID NO: 17147 - protein, 107 aa, Artificial Sequence; identical to SEQ ID NO: 10923
  Description of Artificial Sequence: Synthetic polypeptide
  VL of XENP018172

SEQ ID NO: 17148 - protein, 11 aa, Artificial Sequence
  Description of Artificial Sequence: Synthetic peptide
  XENP018172 vlCDR1
RASQSVSNDVA

SEQ ID NO: 17149 - protein, 7 aa, Artificial Sequence
  Description of Artificial Sequence: Synthetic peptide
  XENP018172 vlCDR2
YASHRYT

SEQ ID NO: 17150 - protein, 9 aa, Artificial Sequence
  Description of Artificial Sequence: Synthetic peptide
  XENP018172 vlCDR3
QQDYSSPRT

SEQ ID NO: 17151 - protein, 451 aa, Artificial Sequence
  Description of Artificial Sequence: Synthetic polypeptide
  XENP018173 1G6_H1.76_L1_IgG1_PVA_/S267K Heavy Chain
EVQLVESGGGLVKPGGSLRLSCAASGFTFSNYWMNWVRQAPGKGLEWVGEIRVKSNNYATHYAEPVKGRFTISRDDSKSTVYLQMNSLKTEDTAVYYCTRYYGNYGGYFDVWGAGTLVTVSSASTKGPSVFPLAPSSKSTSGGTAALGCLVKDYFPEPVTVSWNSGALTSGVHTFPAVLQSSGLYSLSSVVTVPSSSLGTQTYICNVNHKPSNTKVDKKVEPKSCDKTHTCPPCPAPPVAGPSVFLFPPKPKDTLMISRTPEVTCVVVDVKHEDPEVKFNWYVDGVEVHNAKTKPREEQYNSTYRVVSVLTVLHQDWLNGKEYKCKVSNKALPAPIEKTISKAKGQPREPQVYTLPPSREEMTKNQVSLTCLVKGFYPSDIAVEWESNGQPENNYKTTPPVLDSDGSFFLYSKLTVDKSRWQQGNVFSCSVMHEALHNHYTQKSLSLSPGK

SEQ ID NO: 17152 - protein, 122 aa, Artificial Sequence; identical to SEQ ID NO: 11711
  Description of Artificial Sequence: Synthetic polypeptide
  VH of XENP018173

SEQ ID NO: 17153 - protein, 5 aa, Artificial Sequence
  Description of Artificial Sequence: Synthetic peptide
  XENP018173 vhCDR1
NYWMN

SEQ ID NO: 17154 - protein, 19 aa, Artificial Sequence
  Description of Artificial Sequence: Synthetic peptide
  XENP018173 vhCDR2
EIRVKSNNYATHYAEPVKG

SEQ ID NO: 17155 - protein, 11 aa, Artificial Sequence
  Description of Artificial Sequence: Synthetic peptide
  XENP018173 vhCDR3
YYGNYGGYFDV

SEQ ID NO: 17156 - protein, 214 aa, Artificial Sequence; identical to SEQ ID NO: 16226
  Description of Artificial Sequence: Synthetic polypeptide
  XENP018173 1G6_H1.76_L1_IgG1_PVA_/S267K Light Chain

SEQ ID NO: 17157 - protein, 107 aa, Artificial Sequence; identical to SEQ ID NO: 10923
  Description of Artificial Sequence: Synthetic polypeptide
  VL of XENP018173

SEQ ID NO: 17158 - protein, 11 aa, Artificial Sequence
  Description of Artificial Sequence: Synthetic peptide
  XENP018173 vlCDR1
RASQSVSNDVA

SEQ ID NO: 17159 - protein, 7 aa, Artificial Sequence
  Description of Artificial Sequence: Synthetic peptide
  XENP018173 vlCDR2
YASHRYT

SEQ ID NO: 17160 - protein, 9 aa, Artificial Sequence
  Description of Artificial Sequence: Synthetic peptide
  XENP018173 vlCDR3
QQDYSSPRT

SEQ ID NO: 17161 - protein, 451 aa, Artificial Sequence
  Description of Artificial Sequence: Synthetic polypeptide
  XENP018174 1G6_H1.77_L1_IgG1_PVA_/S267K Heavy Chain
EVQLVESGGGLVKPGGSLRLSCAASGFTFSNYWMNWVRQAPGKGLEWVGEIRYKSNNYATHYAEPVKGRFTISRDDSKSTVYLQMNSLKTEDTAVYYCTRYYGNYGGYFDVWGAGTLVTVSSASTKGPSVFPLAPSSKSTSGGTAALGCLVKDYFPEPVTVSWNSGALTSGVHTFPAVLQSSGLYSLSSVVTVPSSSLGTQTYICNVNHKPSNTKVDKKVEPKSCDKTHTCPPCPAPPVAGPSVFLFPPKPKDTLMISRTPEVTCVVVDVKHEDPEVKFNWYVDGVEVHNAKTKPREEQYNSTYRVVSVLTVLHQDWLNGKEYKCKVSNKALPAPIEKTISKAKGQPREPQVYTLPPSREEMTKNQVSLTCLVKGFYPSDIAVEWESNGQPENNYKTTPPVLDSDGSFFLYSKLTVDKSRWQQGNVFSCSVMHEALHNHYTQKSLSLSPGK

SEQ ID NO: 17162 - protein, 122 aa, Artificial Sequence; identical to SEQ ID NO: 11720
  Description of Artificial Sequence: Synthetic polypeptide
  VH of XENP018174

SEQ ID NO: 17163 - protein, 5 aa, Artificial Sequence
  Description of Artificial Sequence: Synthetic peptide
  XENP018174 vhCDR1
NYWMN

SEQ ID NO: 17164 - protein, 19 aa, Artificial Sequence
  Description of Artificial Sequence: Synthetic peptide
  XENP018174 vhCDR2
EIRYKSNNYATHYAEPVKG

SEQ ID NO: 17165 - protein, 11 aa, Artificial Sequence
  Description of Artificial Sequence: Synthetic peptide
  XENP018174 vhCDR3
YYGNYGGYFDV

SEQ ID NO: 17166 - protein, 214 aa, Artificial Sequence; identical to SEQ ID NO: 16226
  Description of Artificial Sequence: Synthetic polypeptide
  XENP018174 1G6_H1.77_L1_IgG1_PVA_/S267K Light Chain

SEQ ID NO: 17167 - protein, 107 aa, Artificial Sequence; identical to SEQ ID NO: 10923
  Description of Artificial Sequence: Synthetic polypeptide
  VL of XENP018174

SEQ ID NO: 17168 - protein, 11 aa, Artificial Sequence
  Description of Artificial Sequence: Synthetic peptide
  XENP018174 vlCDR1
RASQSVSNDVA

SEQ ID NO: 17169 - protein, 7 aa, Artificial Sequence
  Description of Artificial Sequence: Synthetic peptide
  XENP018174 vlCDR2
YASHRYT

SEQ ID NO: 17170 - protein, 9 aa, Artificial Sequence
  Description of Artificial Sequence: Synthetic peptide
  XENP018174 vlCDR3
QQDYSSPRT

SEQ ID NO: 17171 - protein, 451 aa, Artificial Sequence
  Description of Artificial Sequence: Synthetic polypeptide
  XENP018175 1G6_H1.78_L1_IgG1_PVA_/S267K Heavy Chain
EVQLVESGGGLVKPGGSLRLSCAASGFTFSNYWMNWVRQAPGKGLEWVGEIRWKSNNYATHYAEPVKGRFTISRDDSKSTVYLQMNSLKTEDTAVYYCTRYYGNYGGYFDVWGAGTLVTVSSASTKGPSVFPLAPSSKSTSGGTAALGCLVKDYFPEPVTVSWNSGALTSGVHTFPAVLQSSGLYSLSSVVTVPSSSLGTQTYICNVNHKPSNTKVDKKVEPKSCDKTHTCPPCPAPPVAGPSVFLFPPKPKDTLMISRTPEVTCVVVDVKHEDPEVKFNWYVDGVEVHNAKTKPREEQYNSTYRVVSVLTVLHQDWLNGKEYKCKVSNKALPAPIEKTISKAKGQPREPQVYTLPPSREEMTKNQVSLTCLVKGFYPSDIAVEWESNGQPENNYKTTPPVLDSDGSFFLYSKLTVDKSRWQQGNVFSCSVMHEALHNHYTQKSLSLSPGK

SEQ ID NO: 17172 - protein, 122 aa, Artificial Sequence; identical to SEQ ID NO: 11729
  Description of Artificial Sequence: Synthetic polypeptide
  VH of XENP018175

SEQ ID NO: 17173 - protein, 5 aa, Artificial Sequence
  Description of Artificial Sequence: Synthetic peptide
  XENP018175 vhCDR1
NYWMN

SEQ ID NO: 17174 - protein, 19 aa, Artificial Sequence
  Description of Artificial Sequence: Synthetic peptide
  XENP018175 vhCDR2
EIRWKSNNYATHYAEPVKG

SEQ ID NO: 17175 - protein, 11 aa, Artificial Sequence
  Description of Artificial Sequence: Synthetic peptide
  XENP018175 vhCDR3
YYGNYGGYFDV

SEQ ID NO: 17176 - protein, 214 aa, Artificial Sequence; identical to SEQ ID NO: 16226
  Description of Artificial Sequence: Synthetic polypeptide
  XENP018175 1G6_H1.78_L1_IgG1_PVA_/S267K Light Chain

SEQ ID NO: 17177 - protein, 107 aa, Artificial Sequence; identical to SEQ ID NO: 10923
  Description of Artificial Sequence: Synthetic polypeptide
  VL of XENP018175

SEQ ID NO: 17178 - protein, 11 aa, Artificial Sequence
  Description of Artificial Sequence: Synthetic peptide
  XENP018175 vlCDR1
RASQSVSNDVA

SEQ ID NO: 17179 - protein, 7 aa, Artificial Sequence
  Description of Artificial Sequence: Synthetic peptide
  XENP018175 vlCDR2
YASHRYT

SEQ ID NO: 17180 - protein, 9 aa, Artificial Sequence
  Description of Artificial Sequence: Synthetic peptide
  XENP018175 vlCDR3
QQDYSSPRT

SEQ ID NO: 17181 - protein, 451 aa, Artificial Sequence
  Description of Artificial Sequence: Synthetic polypeptide
  XENP018176 1G6_H1.79_L1_IgG1_PVA_/S267K Heavy Chain
EVQLVESGGGLVKPGGSLRLSCAASGFTFSNYWMNWVRQAPGKGLEWVGEIRDKSNNYATHYAEPVKGRFTISRDDSKSTVYLQMNSLKTEDTAVYYCTRYYGNYGGYFDVWGAGTLVTVSSASTKGPSVFPLAPSSKSTSGGTAALGCLVKDYFPEPVTVSWNSGALTSGVHTFPAVLQSSGLYSLSSVVTVPSSSLGTQTYICNVNHKPSNTKVDKKVEPKSCDKTHTCPPCPAPPVAGPSVFLFPPKPKDTLMISRTPEVTCVVVDVKHEDPEVKFNWYVDGVEVHNAKTKPREEQYNSTYRVVSVLTVLHQDWLNGKEYKCKVSNKALPAPIEKTISKAKGQPREPQVYTLPPSREEMTKNQVSLTCLVKGFYPSDIAVEWESNGQPENNYKTTPPVLDSDGSFFLYSKLTVDKSRWQQGNVFSCSVMHEALHNHYTQKSLSLSPGK

SEQ ID NO: 17182 - protein, 122 aa, Artificial Sequence; identical to SEQ ID NO: 11738
  Description of Artificial Sequence: Synthetic polypeptide
  VH of XENP018176

SEQ ID NO: 17183 - protein, 5 aa, Artificial Sequence
  Description of Artificial Sequence: Synthetic peptide
  XENP018176 vhCDR1
NYWMN

SEQ ID NO: 17184 - protein, 19 aa, Artificial Sequence
  Description of Artificial Sequence: Synthetic peptide
  XENP018176 vhCDR2
EIRDKSNNYATHYAEPVKG

SEQ ID NO: 17185 - protein, 11 aa, Artificial Sequence
  Description of Artificial Sequence: Synthetic peptide
  XENP018176 vhCDR3
YYGNYGGYFDV

SEQ ID NO: 17186 - protein, 214 aa, Artificial Sequence; identical to SEQ ID NO: 16226
  Description of Artificial Sequence: Synthetic polypeptide
  XENP018176 1G6_H1.79_L1_IgG1_PVA_/S267K Light Chain

SEQ ID NO: 17187 - protein, 107 aa, Artificial Sequence; identical to SEQ ID NO: 10923
  Description of Artificial Sequence: Synthetic polypeptide
  VL of XENP018176

SEQ ID NO: 17188 - protein, 11 aa, Artificial Sequence
  Description of Artificial Sequence: Synthetic peptide
  XENP018176 vlCDR1
RASQSVSNDVA

SEQ ID NO: 17189 - protein, 7 aa, Artificial Sequence
  Description of Artificial Sequence: Synthetic peptide
  XENP018176 vlCDR2
YASHRYT

SEQ ID NO: 17190 - protein, 9 aa, Artificial Sequence
  Description of Artificial Sequence: Synthetic peptide
  XENP018176 vlCDR3
QQDYSSPRT

SEQ ID NO: 17191 - protein, 451 aa, Artificial Sequence
  Description of Artificial Sequence: Synthetic polypeptide
  XENP018177 1G6_H1.80_L1_IgG1_PVA_/S267K Heavy Chain
EVQLVESGGGLVKPGGSLRLSCAASGFTFSNYWMNWVRQAPGKGLEWVGEIRAKSNNYATHYAEPVKGRFTISRDDSKSTVYLQMNSLKTEDTAVYYCTRYYGNYGGYFDVWGAGTLVTVSSASTKGPSVFPLAPSSKSTSGGTAALGCLVKDYFPEPVTVSWNSGALTSGVHTFPAVLQSSGLYSLSSVVTVPSSSLGTQTYICNVNHKPSNTKVDKKVEPKSCDKTHTCPPCPAPPVAGPSVFLFPPKPKDTLMISRTPEVTCVVVDVKHEDPEVKFNWYVDGVEVHNAKTKPREEQYNSTYRVVSVLTVLHQDWLNGKEYKCKVSNKALPAPIEKTISKAKGQPREPQVYTLPPSREEMTKNQVSLTCLVKGFYPSDIAVEWESNGQPENNYKTTPPVLDSDGSFFLYSKLTVDKSRWQQGNVFSCSVMHEALHNHYTQKSLSLSPGK

SEQ ID NO: 17192 - protein, 122 aa, Artificial Sequence; identical to SEQ ID NO: 11747
  Description of Artificial Sequence: Synthetic polypeptide
  VH of XENP018177

SEQ ID NO: 17193 - protein, 5 aa, Artificial Sequence
  Description of Artificial Sequence: Synthetic peptide
  XENP018177 vhCDR1
NYWMN

SEQ ID NO: 17194 - protein, 19 aa, Artificial Sequence
  Description of Artificial Sequence: Synthetic peptide
  XENP018177 vhCDR2
EIRAKSNNYATHYAEPVKG

SEQ ID NO: 17195 - protein, 11 aa, Artificial Sequence
  Description of Artificial Sequence: Synthetic peptide
  XENP018177 vhCDR3
YYGNYGGYFDV

SEQ ID NO: 17196 - protein, 214 aa, Artificial Sequence; identical to SEQ ID NO: 16226
  Description of Artificial Sequence: Synthetic polypeptide
  XENP018177 1G6_H1.80_L1_IgG1_PVA_/S267K Light Chain

SEQ ID NO: 17197 - protein, 107 aa, Artificial Sequence; identical to SEQ ID NO: 10923
  Description of Artificial Sequence: Synthetic polypeptide
  VL of XENP018177

SEQ ID NO: 17198 - protein, 11 aa, Artificial Sequence
  Description of Artificial Sequence: Synthetic peptide
  XENP018177 vlCDR1
RASQSVSNDVA

SEQ ID NO: 17199 - protein, 7 aa, Artificial Sequence
  Description of Artificial Sequence: Synthetic peptide
  XENP018177 vlCDR2
YASHRYT

SEQ ID NO: 17200 - protein, 9 aa, Artificial Sequence
  Description of Artificial Sequence: Synthetic peptide
  XENP018177 vlCDR3
QQDYSSPRT

SEQ ID NO: 17201 - protein, 451 aa, Artificial Sequence
  Description of Artificial Sequence: Synthetic polypeptide
  XENP018178 1G6_H1.81_L1_IgG1_PVA_/S267K Heavy Chain
EVQLVESGGGLVKPGGSLRLSCAASGFTFSNYWMNWVRQAPGKGLEWVGEIRQKSNNYATHYAEPVKGRFTISRDDSKSTVYLQMNSLKTEDTAVYYCTRYYGNYGGYFDVWGAGTLVTVSSASTKGPSVFPLAPSSKSTSGGTAALGCLVKDYFPEPVTVSWNSGALTSGVHTFPAVLQSSGLYSLSSVVTVPSSSLGTQTYICNVNHKPSNTKVDKKVEPKSCDKTHTCPPCPAPPVAGPSVFLFPPKPKDTLMISRTPEVTCVVVDVKHEDPEVKFNWYVDGVEVHNAKTKPREEQYNSTYRVVSVLTVLHQDWLNGKEYKCKVSNKALPAPIEKTISKAKGQPREPQVYTLPPSREEMTKNQVSLTCLVKGFYPSDIAVEWESNGQPENNYKTTPPVLDSDGSFFLYSKLTVDKSRWQQGNVFSCSVMHEALHNHYTQKSLSLSPGK

SEQ ID NO: 17202 - protein, 122 aa, Artificial Sequence; identical to SEQ ID NO: 11756
  Description of Artificial Sequence: Synthetic polypeptide
  VH of XENP018178

SEQ ID NO: 17203 - protein, 5 aa, Artificial Sequence
  Description of Artificial Sequence: Synthetic peptide
  XENP018178 vhCDR1
NYWMN

SEQ ID NO: 17204 - protein, 19 aa, Artificial Sequence
  Description of Artificial Sequence: Synthetic peptide
  XENP018178 vhCDR2
EIRQKSNNYATHYAEPVKG

SEQ ID NO: 17205 - protein, 11 aa, Artificial Sequence
  Description of Artificial Sequence: Synthetic peptide
  XENP018178 vhCDR3
YYGNYGGYFDV

SEQ ID NO: 17206 - protein, 214 aa, Artificial Sequence; identical to SEQ ID NO: 16226
  Description of Artificial Sequence: Synthetic polypeptide
  XENP018178 1G6_H1.81_L1_IgG1_PVA_/S267K Light Chain

SEQ ID NO: 17207 - protein, 107 aa, Artificial Sequence; identical to SEQ ID NO: 10923
  Description of Artificial Sequence: Synthetic polypeptide
  VL of XENP018178

SEQ ID NO: 17208 - protein, 11 aa, Artificial Sequence
  Description of Artificial Sequence: Synthetic peptide
  XENP018178 vlCDR1
RASQSVSNDVA

SEQ ID NO: 17209 - protein, 7 aa, Artificial Sequence
  Description of Artificial Sequence: Synthetic peptide
  XENP018178 vlCDR2
YASHRYT

SEQ ID NO: 17210 - protein, 9 aa, Artificial Sequence
  Description of Artificial Sequence: Synthetic peptide
  XENP018178 vlCDR3
QQDYSSPRT

SEQ ID NO: 17211 - protein, 451 aa, Artificial Sequence
  Description of Artificial Sequence: Synthetic polypeptide
  XENP018179 1G6_H1.82_L1_IgG1_PVA_/S267K Heavy Chain
EVQLVESGGGLVKPGGSLRLSCAASGFTFSNYWMNWVRQAPGKGLEWVGEIRKKSNNYATHYAEPVKGRFTISRDDSKSTVYLQMNSLKTEDTAVYYCTRYYGNYGGYFDVWGAGTLVTVSSASTKGPSVFPLAPSSKSTSGGTAALGCLVKDYFPEPVTVSWNSGALTSGVHTFPAVLQSSGLYSLSSVVTVPSSSLGTQTYICNVNHKPSNTKVDKKVEPKSCDKTHTCPPCPAPPVAGPSVFLFPPKPKDTLMISRTPEVTCVVVDVKHEDPEVKFNWYVDGVEVHNAKTKPREEQYNSTYRVVSVLTVLHQDWLNGKEYKCKVSNKALPAPIEKTISKAKGQPREPQVYTLPPSREEMTKNQVSLTCLVKGFYPSDIAVEWESNGQPENNYKTTPPVLDSDGSFFLYSKLTVDKSRWQQGNVFSCSVMHEALHNHYTQKSLSLSPGK

SEQ ID NO: 17212 - protein, 122 aa, Artificial Sequence; identical to SEQ ID NO: 11765
  Description of Artificial Sequence: Synthetic polypeptide
  VH of XENP018179

SEQ ID NO: 17213 - protein, 5 aa, Artificial Sequence
  Description of Artificial Sequence: Synthetic peptide
  XENP018179 vhCDR1
NYWMN

SEQ ID NO: 17214 - protein, 19 aa, Artificial Sequence
  Description of Artificial Sequence: Synthetic peptide
  XENP018179 vhCDR2
EIRKKSNNYATHYAEPVKG

SEQ ID NO: 17215 - protein, 11 aa, Artificial Sequence
  Description of Artificial Sequence: Synthetic peptide
  XENP018179 vhCDR3
YYGNYGGYFDV

SEQ ID NO: 17216 - protein, 214 aa, Artificial Sequence; identical to SEQ ID NO: 16226
  Description of Artificial Sequence: Synthetic polypeptide
  XENP018179 1G6_H1.82_L1_IgG1_PVA_/S267K Light Chain

SEQ ID NO: 17217 - protein, 107 aa, Artificial Sequence; identical to SEQ ID NO: 10923
  Description of Artificial Sequence: Synthetic polypeptide
  VL of XENP018179

SEQ ID NO: 17218 - protein, 11 aa, Artificial Sequence
  Description of Artificial Sequence: Synthetic peptide
  XENP018179 vlCDR1
RASQSVSNDVA

SEQ ID NO: 17219 - protein, 7 aa, Artificial Sequence
  Description of Artificial Sequence: Synthetic peptide
  XENP018179 vlCDR2
YASHRYT

SEQ ID NO: 17220 - protein, 9 aa, Artificial Sequence
  Description of Artificial Sequence: Synthetic peptide
  XENP018179 vlCDR3
QQDYSSPRT

SEQ ID NO: 17221 - protein, 451 aa, Artificial Sequence
  Description of Artificial Sequence: Synthetic polypeptide
  XENP018180 1G6_H1.83_L1_IgG1_PVA_/S267K Heavy Chain
EVQLVESGGGLVKPGGSLRLSCAASGFTFSNYWMNWVRQAPGKGLEWVGEIRLRSNNYATHYAEPVKGRFTISRDDSKSTVYLQMNSLKTEDTAVYYCTRYYGNYGGYFDVWGAGTLVTVSSASTKGPSVFPLAPSSKSTSGGTAALGCLVKDYFPEPVTVSWNSGALTSGVHTFPAVLQSSGLYSLSSVVTVPSSSLGTQTYICNVNHKPSNTKVDKKVEPKSCDKTHTCPPCPAPPVAGPSVFLFPPKPKDTLMISRTPEVTCVVVDVKHEDPEVKFNWYVDGVEVHNAKTKPREEQYNSTYRVVSVLTVLHQDWLNGKEYKCKVSNKALPAPIEKTISKAKGQPREPQVYTLPPSREEMTKNQVSLTCLVKGFYPSDIAVEWESNGQPENNYKTTPPVLDSDGSFFLYSKLTVDKSRWQQGNVFSCSVMHEALHNHYTQKSLSLSPGK

SEQ ID NO: 17222 - protein, 122 aa, Artificial Sequence; identical to SEQ ID NO: 11774
  Description of Artificial Sequence: Synthetic polypeptide
  VH of XENP018180

SEQ ID NO: 17223 - protein, 5 aa, Artificial Sequence
  Description of Artificial Sequence: Synthetic peptide
  XENP018180 vhCDR1
NYWMN

SEQ ID NO: 17224 - protein, 19 aa, Artificial Sequence
  Description of Artificial Sequence: Synthetic peptide
  XENP018180 vhCDR2
EIRLRSNNYATHYAEPVKG

SEQ ID NO: 17225 - protein, 11 aa, Artificial Sequence
  Description of Artificial Sequence: Synthetic peptide
  XENP018180 vhCDR3
YYGNYGGYFDV

SEQ ID NO: 17226 - protein, 214 aa, Artificial Sequence; identical to SEQ ID NO: 16226
  Description of Artificial Sequence: Synthetic polypeptide
  XENP018180 1G6_H1.83_L1_IgG1_PVA_/S267K Light Chain

SEQ ID NO: 17227 - protein, 107 aa, Artificial Sequence; identical to SEQ ID NO: 10923
  Description of Artificial Sequence: Synthetic polypeptide
  VL of XENP018180

SEQ ID NO: 17228 - protein, 11 aa, Artificial Sequence
  Description of Artificial Sequence: Synthetic peptide
  XENP018180 vlCDR1
RASQSVSNDVA

SEQ ID NO: 17229 - protein, 7 aa, Artificial Sequence
  Description of Artificial Sequence: Synthetic peptide
  XENP018180 vlCDR2
YASHRYT

SEQ ID NO: 17230 - protein, 9 aa, Artificial Sequence
  Description of Artificial Sequence: Synthetic peptide
  XENP018180 vlCDR3
QQDYSSPRT

SEQ ID NO: 17231 - protein, 451 aa, Artificial Sequence
  Description of Artificial Sequence: Synthetic polypeptide
  XENP018181 1G6_H1.84_L1_IgG1_PVA_/S267K Heavy Chain
EVQLVESGGGLVKPGGSLRLSCAASGFTFSNYWMNWVRQAPGKGLEWVGEIRLESNNYATHYAEPVKGRFTISRDDSKSTVYLQMNSLKTEDTAVYYCTRYYGNYGGYFDVWGAGTLVTVSSASTKGPSVFPLAPSSKSTSGGTAALGCLVKDYFPEPVTVSWNSGALTSGVHTFPAVLQSSGLYSLSSVVTVPSSSLGTQTYICNVNHKPSNTKVDKKVEPKSCDKTHTCPPCPAPPVAGPSVFLFPPKPKDTLMISRTPEVTCVVVDVKHEDPEVKFNWYVDGVEVHNAKTKPREEQYNSTYRVVSVLTVLHQDWLNGKEYKCKVSNKALPAPIEKTISKAKGQPREPQVYTLPPSREEMTKNQVSLTCLVKGFYPSDIAVEWESNGQPENNYKTTPPVLDSDGSFFLYSKLTVDKSRWQQGNVFSCSVMHEALHNHYTQKSLSLSPGK

SEQ ID NO: 17232 - protein, 122 aa, Artificial Sequence; identical to SEQ ID NO: 11783
  Description of Artificial Sequence: Synthetic polypeptide
  VH of XENP018181

SEQ ID NO: 17233 - protein, 5 aa, Artificial Sequence
  Description of Artificial Sequence: Synthetic peptide
  XENP018181 vhCDR1
NYWMN

SEQ ID NO: 17234 - protein, 19 aa, Artificial Sequence
  Description of Artificial Sequence: Synthetic peptide
  XENP018181 vhCDR2
EIRLESNNYATHYAEPVKG

SEQ ID NO: 17235 - protein, 11 aa, Artificial Sequence
  Description of Artificial Sequence: Synthetic peptide
  XENP018181 vhCDR3
YYGNYGGYFDV

SEQ ID NO: 17236 - protein, 214 aa, Artificial Sequence; identical to SEQ ID NO: 16226
  Description of Artificial Sequence: Synthetic polypeptide
  XENP018181 1G6_H1.84_L1_IgG1_PVA_/S267K Light Chain

SEQ ID NO: 17237 - protein, 107 aa, Artificial Sequence; identical to SEQ ID NO: 10923
  Description of Artificial Sequence: Synthetic polypeptide
  VL of XENP018181

SEQ ID NO: 17238 - protein, 11 aa, Artificial Sequence
  Description of Artificial Sequence: Synthetic peptide
  XENP018181 vlCDR1
RASQSVSNDVA

SEQ ID NO: 17239 - protein, 7 aa, Artificial Sequence
  Description of Artificial Sequence: Synthetic peptide
  XENP018181 vlCDR2
YASHRYT

SEQ ID NO: 17240 - protein, 9 aa, Artificial Sequence
  Description of Artificial Sequence: Synthetic peptide
  XENP018181 vlCDR3
QQDYSSPRT

SEQ ID NO: 17241 - protein, 451 aa, Artificial Sequence
  Description of Artificial Sequence: Synthetic polypeptide
  XENP018182 1G6_H1.85_L1_IgG1_PVA_/S267K Heavy Chain
EVQLVESGGGLVKPGGSLRLSCAASGFTFSNYWMNWVRQAPGKGLEWVGEIRLHSNNYATHYAEPVKGRFTISRDDSKSTVYLQMNSLKTEDTAVYYCTRYYGNYGGYFDVWGAGTLVTVSSASTKGPSVFPLAPSSKSTSGGTAALGCLVKDYFPEPVTVSWNSGALTSGVHTFPAVLQSSGLYSLSSVVTVPSSSLGTQTYICNVNHKPSNTKVDKKVEPKSCDKTHTCPPCPAPPVAGPSVFLFPPKPKDTLMISRTPEVTCVVVDVKHEDPEVKFNWYVDGVEVHNAKTKPREEQYNSTYRVVSVLTVLHQDWLNGKEYKCKVSNKALPAPIEKTISKAKGQPREPQVYTLPPSREEMTKNQVSLTCLVKGFYPSDIAVEWESNGQPENNYKTTPPVLDSDGSFFLYSKLTVDKSRWQQGNVFSCSVMHEALHNHYTQKSLSLSPGK

SEQ ID NO: 17242 - protein, 122 aa, Artificial Sequence; identical to SEQ ID NO: 11792
  Description of Artificial Sequence: Synthetic polypeptide
  VH of XENP018182

SEQ ID NO: 17243 - protein, 5 aa, Artificial Sequence
  Description of Artificial Sequence: Synthetic peptide
  XENP018182 vhCDR1
NYWMN

SEQ ID NO: 17244 - protein, 19 aa, Artificial Sequence
  Description of Artificial Sequence: Synthetic peptide
  XENP018182 vhCDR2
EIRLHSNNYATHYAEPVKG

SEQ ID NO: 17245 - protein, 11 aa, Artificial Sequence
  Description of Artificial Sequence: Synthetic peptide
  XENP018182 vhCDR3
YYGNYGGYFDV

SEQ ID NO: 17246 - protein, 214 aa, Artificial Sequence; identical to SEQ ID NO: 16226
  Description of Artificial Sequence: Synthetic polypeptide
  XENP018182 1G6_H1.85_L1_IgG1_PVA_/S267K Light Chain

SEQ ID NO: 17247 - protein, 107 aa, Artificial Sequence; identical to SEQ ID NO: 10923
  Description of Artificial Sequence: Synthetic polypeptide
  VL of XENP018182

SEQ ID NO: 17248 - protein, 11 aa, Artificial Sequence
  Description of Artificial Sequence: Synthetic peptide
  XENP018182 vlCDR1
RASQSVSNDVA

SEQ ID NO: 17249 - protein, 7 aa, Artificial Sequence
  Description of Artificial Sequence: Synthetic peptide
  XENP018182 vlCDR2
YASHRYT

SEQ ID NO: 17250 - protein, 9 aa, Artificial Sequence
  Description of Artificial Sequence: Synthetic peptide
  XENP018182 vlCDR3
QQDYSSPRT

SEQ ID NO: 17251 - protein, 451 aa, Artificial Sequence
  Description of Artificial Sequence: Synthetic polypeptide
  XENP018183 1G6_H1.86_L1_IgG1_PVA_/S267K Heavy Chain
EVQLVESGGGLVKPGGSLRLSCAASGFTFSNYWMNWVRQAPGKGLEWVGEIRLSSNNYATHYAEPVKGRFTISRDDSKSTVYLQMNSLKTEDTAVYYCTRYYGNYGGYFDVWGAGTLVTVSSASTKGPSVFPLAPSSKSTSGGTAALGCLVKDYFPEPVTVSWNSGALTSGVHTFPAVLQSSGLYSLSSVVTVPSSSLGTQTYICNVNHKPSNTKVDKKVEPKSCDKTHTCPPCPAPPVAGPSVFLFPPKPKDTLMISRTPEVTCVVVDVKHEDPEVKFNWYVDGVEVHNAKTKPREEQYNSTYRVVSVLTVLHQDWLNGKEYKCKVSNKALPAPIEKTISKAKGQPREPQVYTLPPSREEMTKNQVSLTCLVKGFYPSDIAVEWESNGQPENNYKTTPPVLDSDGSFFLYSKLTVDKSRWQQGNVFSCSVMHEALHNHYTQKSLSLSPGK

SEQ ID NO: 17252 - protein, 122 aa, Artificial Sequence; identical to SEQ ID NO: 11801
  Description of Artificial Sequence: Synthetic polypeptide
  VH of XENP018183

SEQ ID NO: 17253 - protein, 5 aa, Artificial Sequence
  Description of Artificial Sequence: Synthetic peptide
  XENP018183 vhCDR1
NYWMN

SEQ ID NO: 17254 - protein, 19 aa, Artificial Sequence
  Description of Artificial Sequence: Synthetic peptide
  XENP018183 vhCDR2
EIRLSSNNYATHYAEPVKG

SEQ ID NO: 17255 - protein, 11 aa, Artificial Sequence
  Description of Artificial Sequence: Synthetic peptide
  XENP018183 vhCDR3
YYGNYGGYFDV

SEQ ID NO: 17256 - protein, 214 aa, Artificial Sequence; identical to SEQ ID NO: 16226
  Description of Artificial Sequence: Synthetic polypeptide
  XENP018183 1G6_H1.86_L1_IgG1_PVA_/S267K Light Chain

SEQ ID NO: 17257 - protein, 107 aa, Artificial Sequence; identical to SEQ ID NO: 10923
  Description of Artificial Sequence: Synthetic polypeptide
  VL of XENP018183

SEQ ID NO: 17258 - protein, 11 aa, Artificial Sequence
  Description of Artificial Sequence: Synthetic peptide
  XENP018183 vlCDR1
RASQSVSNDVA

SEQ ID NO: 17259 - protein, 7 aa, Artificial Sequence
  Description of Artificial Sequence: Synthetic peptide
  XENP018183 vlCDR2
YASHRYT

SEQ ID NO: 17260 - protein, 9 aa, Artificial Sequence
  Description of Artificial Sequence: Synthetic peptide
  XENP018183 vlCDR3
QQDYSSPRT

SEQ ID NO: 17261 - protein, 451 aa, Artificial Sequence
  Description of Artificial Sequence: Synthetic polypeptide
  XENP018184 1G6_H1.87_L1_IgG1_PVA_/S267K Heavy Chain
EVQLVESGGGLVKPGGSLRLSCAASGFTFSNYWMNWVRQAPGKGLEWVGEIRLDSNNYATHYAEPVKGRFTISRDDSKSTVYLQMNSLKTEDTAVYYCTRYYGNYGGYFDVWGAGTLVTVSSASTKGPSVFPLAPSSKSTSGGTAALGCLVKDYFPEPVTVSWNSGALTSGVHTFPAVLQSSGLYSLSSVVTVPSSSLGTQTYICNVNHKPSNTKVDKKVEPKSCDKTHTCPPCPAPPVAGPSVFLFPPKPKDTLMISRTPEVTCVVVDVKHEDPEVKFNWYVDGVEVHNAKTKPREEQYNSTYRVVSVLTVLHQDWLNGKEYKCKVSNKALPAPIEKTISKAKGQPREPQVYTLPPSREEMTKNQVSLTCLVKGFYPSDIAVEWESNGQPENNYKTTPPVLDSDGSFFLYSKLTVDKSRWQQGNVFSCSVMHEALHNHYTQKSLSLSPGK

SEQ ID NO: 17262 - protein, 122 aa, Artificial Sequence; identical to SEQ ID NO: 11810
  Description of Artificial Sequence: Synthetic polypeptide
  VH of XENP018184

SEQ ID NO: 17263 - protein, 5 aa, Artificial Sequence
  Description of Artificial Sequence: Synthetic peptide
  XENP018184 vhCDR1
NYWMN

SEQ ID NO: 17264 - protein, 19 aa, Artificial Sequence
  Description of Artificial Sequence: Synthetic peptide
  XENP018184 vhCDR2
EIRLDSNNYATHYAEPVKG

SEQ ID NO: 17265 - protein, 11 aa, Artificial Sequence
  Description of Artificial Sequence: Synthetic peptide
  XENP018184 vhCDR3
YYGNYGGYFDV

SEQ ID NO: 17266 - protein, 214 aa, Artificial Sequence; identical to SEQ ID NO: 16226
  Description of Artificial Sequence: Synthetic polypeptide
  XENP018184 1G6_H1.87_L1_IgG1_PVA_/S267K Light Chain

SEQ ID NO: 17267 - protein, 107 aa, Artificial Sequence; identical to SEQ ID NO: 10923
  Description of Artificial Sequence: Synthetic polypeptide
  VL of XENP018184

SEQ ID NO: 17268 - protein, 11 aa, Artificial Sequence
  Description of Artificial Sequence: Synthetic peptide
  XENP018184 vlCDR1
RASQSVSNDVA

SEQ ID NO: 17269 - protein, 7 aa, Artificial Sequence
  Description of Artificial Sequence: Synthetic peptide
  XENP018184 vlCDR2
YASHRYT

SEQ ID NO: 17270 - protein, 9 aa, Artificial Sequence
  Description of Artificial Sequence: Synthetic peptide
  XENP018184 vlCDR3
QQDYSSPRT

SEQ ID NO: 17271 - protein, 451 aa, Artificial Sequence
  Description of Artificial Sequence: Synthetic polypeptide
  XENP018185 1G6_H1.88_L1_IgG1_PVA_/S267K Heavy Chain
EVQLVESGGGLVKPGGSLRLSCAASGFTFSNYWMNWVRQAPGKGLEWVGEIRLASNNYATHYAEPVKGRFTISRDDSKSTVYLQMNSLKTEDTAVYYCTRYYGNYGGYFDVWGAGTLVTVSSASTKGPSVFPLAPSSKSTSGGTAALGCLVKDYFPEPVTVSWNSGALTSGVHTFPAVLQSSGLYSLSSVVTVPSSSLGTQTYICNVNHKPSNTKVDKKVEPKSCDKTHTCPPCPAPPVAGPSVFLFPPKPKDTLMISRTPEVTCVVVDVKHEDPEVKFNWYVDGVEVHNAKTKPREEQYNSTYRVVSVLTVLHQDWLNGKEYKCKVSNKALPAPIEKTISKAKGQPREPQVYTLPPSREEMTKNQVSLTCLVKGFYPSDIAVEWESNGQPENNYKTTPPVLDSDGSFFLYSKLTVDKSRWQQGNVFSCSVMHEALHNHYTQKSLSLSPGK

SEQ ID NO: 17272 - protein, 122 aa, Artificial Sequence; identical to SEQ ID NO: 11819
  Description of Artificial Sequence: Synthetic polypeptide
  VH of XENP018185

SEQ ID NO: 17273 - protein, 5 aa, Artificial Sequence
  Description of Artificial Sequence: Synthetic peptide
  XENP018185 vhCDR1
NYWMN

SEQ ID NO: 17274 - protein, 19 aa, Artificial Sequence
  Description of Artificial Sequence: Synthetic peptide
  XENP018185 vhCDR2
EIRLASNNYATHYAEPVKG

SEQ ID NO: 17275 - protein, 11 aa, Artificial Sequence
  Description of Artificial Sequence: Synthetic peptide
  XENP018185 vhCDR3
YYGNYGGYFDV

SEQ ID NO: 17276 - protein, 214 aa, Artificial Sequence; identical to SEQ ID NO: 16226
  Description of Artificial Sequence: Synthetic polypeptide
  XENP018185 1G6_H1.88_L1_IgG1_PVA_/S267K Light Chain

SEQ ID NO: 17277 - protein, 107 aa, Artificial Sequence; identical to SEQ ID NO: 10923
  Description of Artificial Sequence: Synthetic polypeptide
  VL of XENP018185

SEQ ID NO: 17278 - protein, 11 aa, Artificial Sequence
  Description of Artificial Sequence: Synthetic peptide
  XENP018185 vlCDR1
RASQSVSNDVA

SEQ ID NO: 17279 - protein, 7 aa, Artificial Sequence
  Description of Artificial Sequence: Synthetic peptide
  XENP018185 vlCDR2
YASHRYT

SEQ ID NO: 17280 - protein, 9 aa, Artificial Sequence
  Description of Artificial Sequence: Synthetic peptide
  XENP018185 vlCDR3
QQDYSSPRT

SEQ ID NO: 17281 - protein, 451 aa, Artificial Sequence
  Description of Artificial Sequence: Synthetic polypeptide
  XENP018186 1G6_H1.89_L1_IgG1_PVA_/S267K Heavy Chain
EVQLVESGGGLVKPGGSLRLSCAASGFTFSNYWMNWVRQAPGKGLEWVGEIRLGSNNYATHYAEPVKGRFTISRDDSKSTVYLQMNSLKTEDTAVYYCTRYYGNYGGYFDVWGAGTLVTVSSASTKGPSVFPLAPSSKSTSGGTAALGCLVKDYFPEPVTVSWNSGALTSGVHTFPAVLQSSGLYSLSSVVTVPSSSLGTQTYICNVNHKPSNTKVDKKVEPKSCDKTHTCPPCPAPPVAGPSVFLFPPKPKDTLMISRTPEVTCVVVDVKHEDPEVKFNWYVDGVEVHNAKTKPREEQYNSTYRVVSVLTVLHQDWLNGKEYKCKVSNKALPAPIEKTISKAKGQPREPQVYTLPPSREEMTKNQVSLTCLVKGFYPSDIAVEWESNGQPENNYKTTPPVLDSDGSFFLYSKLTVDKSRWQQGNVFSCSVMHEALHNHYTQKSLSLSPGK

SEQ ID NO: 17282 - protein, 122 aa, Artificial Sequence; identical to SEQ ID NO: 11828
  Description of Artificial Sequence: Synthetic polypeptide
  VH of XENP018186

SEQ ID NO: 17283 - protein, 5 aa, Artificial Sequence
  Description of Artificial Sequence: Synthetic peptide
  XENP018186 vhCDR1
NYWMN

SEQ ID NO: 17284 - protein, 19 aa, Artificial Sequence
  Description of Artificial Sequence: Synthetic peptide
  XENP018186 vhCDR2
EIRLGSNNYATHYAEPVKG

SEQ ID NO: 17285 - protein, 11 aa, Artificial Sequence
  Description of Artificial Sequence: Synthetic peptide
  XENP018186 vhCDR3
YYGNYGGYFDV

SEQ ID NO: 17286 - protein, 214 aa, Artificial Sequence; identical to SEQ ID NO: 16226
  Description of Artificial Sequence: Synthetic polypeptide
  XENP018186 1G6_H1.89_L1_IgG1_PVA_/S267K Light Chain

SEQ ID NO: 17287 - protein, 107 aa, Artificial Sequence; identical to SEQ ID NO: 10923
  Description of Artificial Sequence: Synthetic polypeptide
  VL of XENP018186

SEQ ID NO: 17288 - protein, 11 aa, Artificial Sequence
  Description of Artificial Sequence: Synthetic peptide
  XENP018186 vlCDR1
RASQSVSNDVA

SEQ ID NO: 17289 - protein, 7 aa, Artificial Sequence
  Description of Artificial Sequence: Synthetic peptide
  XENP018186 vlCDR2
YASHRYT

SEQ ID NO: 17290 - protein, 9 aa, Artificial Sequence
  Description of Artificial Sequence: Synthetic peptide
  XENP018186 vlCDR3
QQDYSSPRT

SEQ ID NO: 17291 - protein, 451 aa, Artificial Sequence
  Description of Artificial Sequence: Synthetic polypeptide
  XENP018187 1G6_H1.90_L1_IgG1_PVA_/S267K Heavy Chain
EVQLVESGGGLVKPGGSLRLSCAASGFTFSNYWMNWVRQAPGKGLEWVGEIRLYSNNYATHYAEPVKGRFTISRDDSKSTVYLQMNSLKTEDTAVYYCTRYYGNYGGYFDVWGAGTLVTVSSASTKGPSVFPLAPSSKSTSGGTAALGCLVKDYFPEPVTVSWNSGALTSGVHTFPAVLQSSGLYSLSSVVTVPSSSLGTQTYICNVNHKPSNTKVDKKVEPKSCDKTHTCPPCPAPPVAGPSVFLFPPKPKDTLMISRTPEVTCVVVDVKHEDPEVKFNWYVDGVEVHNAKTKPREEQYNSTYRVVSVLTVLHQDWLNGKEYKCKVSNKALPAPIEKTISKAKGQPREPQVYTLPPSREEMTKNQVSLTCLVKGFYPSDIAVEWESNGQPENNYKTTPPVLDSDGSFFLYSKLTVDKSRWQQGNVFSCSVMHEALHNHYTQKSLSLSPGK

SEQ ID NO: 17292 - protein, 122 aa, Artificial Sequence; identical to SEQ ID NO: 11837
  Description of Artificial Sequence: Synthetic polypeptide
  VH of XENP018187

SEQ ID NO: 17293 - protein, 5 aa, Artificial Sequence
  Description of Artificial Sequence: Synthetic peptide
  XENP018187 vhCDR1
NYWMN

SEQ ID NO: 17294 - protein, 19 aa, Artificial Sequence
  Description of Artificial Sequence: Synthetic peptide
  XENP018187 vhCDR2
EIRLYSNNYATHYAEPVKG

SEQ ID NO: 17295 - protein, 11 aa, Artificial Sequence
  Description of Artificial Sequence: Synthetic peptide
  XENP018187 vhCDR3
YYGNYGGYFDV

SEQ ID NO: 17296 - protein, 214 aa, Artificial Sequence; identical to SEQ ID NO: 16226
  Description of Artificial Sequence: Synthetic polypeptide
  XENP018187 1G6_H1.90_L1_IgG1_PVA_/S267K Light Chain

SEQ ID NO: 17297 - protein, 107 aa, Artificial Sequence; identical to SEQ ID NO: 10923
  Description of Artificial Sequence: Synthetic polypeptide
  VL of XENP018187

SEQ ID NO: 17298 - protein, 11 aa, Artificial Sequence
  Description of Artificial Sequence: Synthetic peptide
  XENP018187 vlCDR1
RASQSVSNDVA

SEQ ID NO: 17299 - protein, 7 aa, Artificial Sequence
  Description of Artificial Sequence: Synthetic peptide
  XENP018187 vlCDR2
YASHRYT

SEQ ID NO: 17300 - protein, 9 aa, Artificial Sequence
  Description of Artificial Sequence: Synthetic peptide
  XENP018187 vlCDR3
QQDYSSPRT

SEQ ID NO: 17301 - protein, 451 aa, Artificial Sequence
  Description of Artificial Sequence: Synthetic polypeptide
  XENP018188 1G6_H1.91_L1_IgG1_PVA_/S267K Heavy Chain
EVQLVESGGGLVKPGGSLRLSCAASGFTFSNYWMNWVRQAPGKGLEWVGEIRLISNNYATHYAEPVKGRFTISRDDSKSTVYLQMNSLKTEDTAVYYCTRYYGNYGGYFDVWGAGTLVTVSSASTKGPSVFPLAPSSKSTSGGTAALGCLVKDYFPEPVTVSWNSGALTSGVHTFPAVLQSSGLYSLSSVVTVPSSSLGTQTYICNVNHKPSNTKVDKKVEPKSCDKTHTCPPCPAPPVAGPSVFLFPPKPKDTLMISRTPEVTCVVVDVKHEDPEVKFNWYVDGVEVHNAKTKPREEQYNSTYRVVSVLTVLHQDWLNGKEYKCKVSNKALPAPIEKTISKAKGQPREPQVYTLPPSREEMTKNQVSLTCLVKGFYPSDIAVEWESNGQPENNYKTTPPVLDSDGSFFLYSKLTVDKSRWQQGNVFSCSVMHEALHNHYTQKSLSLSPGK

SEQ ID NO: 17302 - protein, 122 aa, Artificial Sequence; identical to SEQ ID NO: 11846
  Description of Artificial Sequence: Synthetic polypeptide
  VH of XENP018188

SEQ ID NO: 17303 - protein, 5 aa, Artificial Sequence
  Description of Artificial Sequence: Synthetic peptide
  XENP018188 vhCDR1
NYWMN

SEQ ID NO: 17304 - protein, 19 aa, Artificial Sequence
  Description of Artificial Sequence: Synthetic peptide
  XENP018188 vhCDR2
EIRLISNNYATHYAEPVKG

SEQ ID NO: 17305 - protein, 11 aa, Artificial Sequence
  Description of Artificial Sequence: Synthetic peptide
  XENP018188 vhCDR3
YYGNYGGYFDV

SEQ ID NO: 17306 - protein, 214 aa, Artificial Sequence; identical to SEQ ID NO: 16226
  Description of Artificial Sequence: Synthetic polypeptide
  XENP018188 1G6_H1.91_L1_IgG1_PVA_/S267K Light Chain

SEQ ID NO: 17307 - protein, 107 aa, Artificial Sequence; identical to SEQ ID NO: 10923
  Description of Artificial Sequence: Synthetic polypeptide
  VL of XENP018188

SEQ ID NO: 17308 - protein, 11 aa, Artificial Sequence
  Description of Artificial Sequence: Synthetic peptide
  XENP018188 vlCDR1
RASQSVSNDVA

SEQ ID NO: 17309 - protein, 7 aa, Artificial Sequence
  Description of Artificial Sequence: Synthetic peptide
  XENP018188 vlCDR2
YASHRYT

SEQ ID NO: 17310 - protein, 9 aa, Artificial Sequence
  Description of Artificial Sequence: Synthetic peptide
  XENP018188 vlCDR3
QQDYSSPRT

SEQ ID NO: 17311 - protein, 451 aa, Artificial Sequence
  Description of Artificial Sequence: Synthetic polypeptide
  XENP018189 1G6_H1.92_L1_IgG1_PVA_/S267K Heavy Chain
EVQLVESGGGLVKPGGSLRLSCAASGFTFSNYWMNWVRQAPGKGLEWVGEIRLKTNNYATHYAEPVKGRFTISRDDSKSTVYLQMNSLKTEDTAVYYCTRYYGNYGGYFDVWGAGTLVTVSSASTKGPSVFPLAPSSKSTSGGTAALGCLVKDYFPEPVTVSWNSGALTSGVHTFPAVLQSSGLYSLSSVVTVPSSSLGTQTYICNVNHKPSNTKVDKKVEPKSCDKTHTCPPCPAPPVAGPSVFLFPPKPKDTLMISRTPEVTCVVVDVKHEDPEVKFNWYVDGVEVHNAKTKPREEQYNSTYRVVSVLTVLHQDWLNGKEYKCKVSNKALPAPIEKTISKAKGQPREPQVYTLPPSREEMTKNQVSLTCLVKGFYPSDIAVEWESNGQPENNYKTTPPVLDSDGSFFLYSKLTVDKSRWQQGNVFSCSVMHEALHNHYTQKSLSLSPGK

SEQ ID NO: 17312 - protein, 122 aa, Artificial Sequence; identical to SEQ ID NO: 11855
  Description of Artificial Sequence: Synthetic polypeptide
  VH of XENP018189

SEQ ID NO: 17313 - protein, 5 aa, Artificial Sequence
  Description of Artificial Sequence: Synthetic peptide
  XENP018189 vhCDR1
NYWMN

SEQ ID NO: 17314 - protein, 19 aa, Artificial Sequence
  Description of Artificial Sequence: Synthetic peptide
  XENP018189 vhCDR2
EIRLKTNNYATHYAEPVKG

SEQ ID NO: 17315 - protein, 11 aa, Artificial Sequence
  Description of Artificial Sequence: Synthetic peptide
  XENP018189 vhCDR3
YYGNYGGYFDV

SEQ ID NO: 17316 - protein, 214 aa, Artificial Sequence; identical to SEQ ID NO: 16226
  Description of Artificial Sequence: Synthetic polypeptide
  XENP018189 1G6_H1.92_L1_IgG1_PVA_/S267K Light Chain

SEQ ID NO: 17317 - protein, 107 aa, Artificial Sequence; identical to SEQ ID NO: 10923
  Description of Artificial Sequence: Synthetic polypeptide
  VL of XENP018189

SEQ ID NO: 17318 - protein, 11 aa, Artificial Sequence
  Description of Artificial Sequence: Synthetic peptide
  XENP018189 vlCDR1
RASQSVSNDVA

SEQ ID NO: 17319 - protein, 7 aa, Artificial Sequence
  Description of Artificial Sequence: Synthetic peptide
  XENP018189 vlCDR2
YASHRYT

SEQ ID NO: 17320 - protein, 9 aa, Artificial Sequence
  Description of Artificial Sequence: Synthetic peptide
  XENP018189 vlCDR3
QQDYSSPRT

SEQ ID NO: 17321 - protein, 451 aa, Artificial Sequence
  Description of Artificial Sequence: Synthetic polypeptide
  XENP018190 1G6_H1.93_L1_IgG1_PVA_/S267K Heavy Chain
EVQLVESGGGLVKPGGSLRLSCAASGFTFSNYWMNWVRQAPGKGLEWVGEIRLKANNYATHYAEPVKGRFTISRDDSKSTVYLQMNSLKTEDTAVYYCTRYYGNYGGYFDVWGAGTLVTVSSASTKGPSVFPLAPSSKSTSGGTAALGCLVKDYFPEPVTVSWNSGALTSGVHTFPAVLQSSGLYSLSSVVTVPSSSLGTQTYICNVNHKPSNTKVDKKVEPKSCDKTHTCPPCPAPPVAGPSVFLFPPKPKDTLMISRTPEVTCVVVDVKHEDPEVKFNWYVDGVEVHNAKTKPREEQYNSTYRVVSVLTVLHQDWLNGKEYKCKVSNKALPAPIEKTISKAKGQPREPQVYTLPPSREEMTKNQVSLTCLVKGFYPSDIAVEWESNGQPENNYKTTPPVLDSDGSFFLYSKLTVDKSRWQQGNVFSCSVMHEALHNHYTQKSLSLSPGK

SEQ ID NO: 17322 - protein, 122 aa, Artificial Sequence; identical to SEQ ID NO: 11864
  Description of Artificial Sequence: Synthetic polypeptide
  VH of XENP018190

SEQ ID NO: 17323 - protein, 5 aa, Artificial Sequence
  Description of Artificial Sequence: Synthetic peptide
  XENP018190 vhCDR1
NYWMN

SEQ ID NO: 17324 - protein, 19 aa, Artificial Sequence
  Description of Artificial Sequence: Synthetic peptide
  XENP018190 vhCDR2
EIRLKANNYATHYAEPVKG

SEQ ID NO: 17325 - protein, 11 aa, Artificial Sequence
  Description of Artificial Sequence: Synthetic peptide
  XENP018190 vhCDR3
YYGNYGGYFDV

SEQ ID NO: 17326 - protein, 214 aa, Artificial Sequence; identical to SEQ ID NO: 16226
  Description of Artificial Sequence: Synthetic polypeptide
  XENP018190 1G6_H1.93_L1_IgG1_PVA_/S267K Light Chain

SEQ ID NO: 17327 - protein, 107 aa, Artificial Sequence; identical to SEQ ID NO: 10923
  Description of Artificial Sequence: Synthetic polypeptide
  VL of XENP018190

SEQ ID NO: 17328 - protein, 11 aa, Artificial Sequence
  Description of Artificial Sequence: Synthetic peptide
  XENP018190 vlCDR1
RASQSVSNDVA

SEQ ID NO: 17329 - protein, 7 aa, Artificial Sequence
  Description of Artificial Sequence: Synthetic peptide
  XENP018190 vlCDR2
YASHRYT

SEQ ID NO: 17330 - protein, 9 aa, Artificial Sequence
  Description of Artificial Sequence: Synthetic peptide
  XENP018190 vlCDR3
QQDYSSPRT

SEQ ID NO: 17331 - protein, 451 aa, Artificial Sequence
  Description of Artificial Sequence: Synthetic polypeptide
  XENP018191 1G6_H1.94_L1_IgG1_PVA_/S267K Heavy Chain
EVQLVESGGGLVKPGGSLRLSCAASGFTFSNYWMNWVRQAPGKGLEWVGEIRLKQNNYATHYAEPVKGRFTISRDDSKSTVYLQMNSLKTEDTAVYYCTRYYGNYGGYFDVWGAGTLVTVSSASTKGPSVFPLAPSSKSTSGGTAALGCLVKDYFPEPVTVSWNSGALTSGVHTFPAVLQSSGLYSLSSVVTVPSSSLGTQTYICNVNHKPSNTKVDKKVEPKSCDKTHTCPPCPAPPVAGPSVFLFPPKPKDTLMISRTPEVTCVVVDVKHEDPEVKFNWYVDGVEVHNAKTKPREEQYNSTYRVVSVLTVLHQDWLNGKEYKCKVSNKALPAPIEKTISKAKGQPREPQVYTLPPSREEMTKNQVSLTCLVKGFYPSDIAVEWESNGQPENNYKTTPPVLDSDGSFFLYSKLTVDKSRWQQGNVFSCSVMHEALHNHYTQKSLSLSPGK

SEQ ID NO: 17332 - protein, 122 aa, Artificial Sequence; identical to SEQ ID NO: 11873
  Description of Artificial Sequence: Synthetic polypeptide
  VH of XENP018191

SEQ ID NO: 17333 - protein, 5 aa, Artificial Sequence
  Description of Artificial Sequence: Synthetic peptide
  XENP018191 vhCDR1
NYWMN

SEQ ID NO: 17334 - protein, 19 aa, Artificial Sequence
  Description of Artificial Sequence: Synthetic peptide
  XENP018191 vhCDR2
EIRLKQNNYATHYAEPVKG

SEQ ID NO: 17335 - protein, 11 aa, Artificial Sequence
  Description of Artificial Sequence: Synthetic peptide
  XENP018191 vhCDR3
YYGNYGGYFDV

SEQ ID NO: 17336 - protein, 214 aa, Artificial Sequence; identical to SEQ ID NO: 16226
  Description of Artificial Sequence: Synthetic polypeptide
  XENP018191 1G6_H1.94_L1_IgG1_PVA_/S267K Light Chain

SEQ ID NO: 17337 - protein, 107 aa, Artificial Sequence; identical to SEQ ID NO: 10923
  Description of Artificial Sequence: Synthetic polypeptide
  VL of XENP018191

SEQ ID NO: 17338 - protein, 11 aa, Artificial Sequence
  Description of Artificial Sequence: Synthetic peptide
  XENP018191 vlCDR1
RASQSVSNDVA

SEQ ID NO: 17339 - protein, 7 aa, Artificial Sequence
  Description of Artificial Sequence: Synthetic peptide
  XENP018191 vlCDR2
YASHRYT

SEQ ID NO: 17340 - protein, 9 aa, Artificial Sequence
  Description of Artificial Sequence: Synthetic peptide
  XENP018191 vlCDR3
QQDYSSPRT

SEQ ID NO: 17341 - protein, 451 aa, Artificial Sequence
  Description of Artificial Sequence: Synthetic polypeptide
  XENP018192 1G6_H1.95_L1_IgG1_PVA_/S267K Heavy Chain
EVQLVESGGGLVKPGGSLRLSCAASGFTFSNYWMNWVRQAPGKGLEWVGEIRLKGNNYATHYAEPVKGRFTISRDDSKSTVYLQMNSLKTEDTAVYYCTRYYGNYGGYFDVWGAGTLVTVSSASTKGPSVFPLAPSSKSTSGGTAALGCLVKDYFPEPVTVSWNSGALTSGVHTFPAVLQSSGLYSLSSVVTVPSSSLGTQTYICNVNHKPSNTKVDKKVEPKSCDKTHTCPPCPAPPVAGPSVFLFPPKPKDTLMISRTPEVTCVVVDVKHEDPEVKFNWYVDGVEVHNAKTKPREEQYNSTYRVVSVLTVLHQDWLNGKEYKCKVSNKALPAPIEKTISKAKGQPREPQVYTLPPSREEMTKNQVSLTCLVKGFYPSDIAVEWESNGQPENNYKTTPPVLDSDGSFFLYSKLTVDKSRWQQGNVFSCSVMHEALHNHYTQKSLSLSPGK

SEQ ID NO: 17342 - protein, 122 aa, Artificial Sequence; identical to SEQ ID NO: 11882
  Description of Artificial Sequence: Synthetic polypeptide
  VH of XENP018192

SEQ ID NO: 17343 - protein, 5 aa, Artificial Sequence
  Description of Artificial Sequence: Synthetic peptide
  XENP018192 vhCDR1
NYWMN

SEQ ID NO: 17344 - protein, 19 aa, Artificial Sequence
  Description of Artificial Sequence: Synthetic peptide
  XENP018192 vhCDR2
EIRLKGNNYATHYAEPVKG

SEQ ID NO: 17345 - protein, 11 aa, Artificial Sequence
  Description of Artificial Sequence: Synthetic peptide
  XENP018192 vhCDR3
YYGNYGGYFDV

SEQ ID NO: 17346 - protein, 214 aa, Artificial Sequence; identical to SEQ ID NO: 16226
  Description of Artificial Sequence: Synthetic polypeptide
  XENP018192 1G6_H1.95_L1_IgG1_PVA_/S267K Light Chain

SEQ ID NO: 17347 - protein, 107 aa, Artificial Sequence; identical to SEQ ID NO: 10923
  Description of Artificial Sequence: Synthetic polypeptide
  VL of XENP018192

SEQ ID NO: 17348 - protein, 11 aa, Artificial Sequence
  Description of Artificial Sequence: Synthetic peptide
  XENP018192 vlCDR1
RASQSVSNDVA

SEQ ID NO: 17349 - protein, 7 aa, Artificial Sequence
  Description of Artificial Sequence: Synthetic peptide
  XENP018192 vlCDR2
YASHRYT

SEQ ID NO: 17350 - protein, 9 aa, Artificial Sequence
  Description of Artificial Sequence: Synthetic peptide
  XENP018192 vlCDR3
QQDYSSPRT

SEQ ID NO: 17351 - protein, 451 aa, Artificial Sequence
  Description of Artificial Sequence: Synthetic polypeptide
  XENP018193 1G6_H1.96_L1_IgG1_PVA_/S267K Heavy Chain
EVQLVESGGGLVKPGGSLRLSCAASGFTFSNYWMNWVRQAPGKGLEWVGEIRLKVNNYATHYAEPVKGRFTISRDDSKSTVYLQMNSLKTEDTAVYYCTRYYGNYGGYFDVWGAGTLVTVSSASTKGPSVFPLAPSSKSTSGGTAALGCLVKDYFPEPVTVSWNSGALTSGVHTFPAVLQSSGLYSLSSVVTVPSSSLGTQTYICNVNHKPSNTKVDKKVEPKSCDKTHTCPPCPAPPVAGPSVFLFPPKPKDTLMISRTPEVTCVVVDVKHEDPEVKFNWYVDGVEVHNAKTKPREEQYNSTYRVVSVLTVLHQDWLNGKEYKCKVSNKALPAPIEKTISKAKGQPREPQVYTLPPSREEMTKNQVSLTCLVKGFYPSDIAVEWESNGQPENNYKTTPPVLDSDGSFFLYSKLTVDKSRWQQGNVFSCSVMHEALHNHYTQKSLSLSPGK

SEQ ID NO: 17352 - protein, 122 aa, Artificial Sequence; identical to SEQ ID NO: 11891
  Description of Artificial Sequence: Synthetic polypeptide
  VH of XENP018193

SEQ ID NO: 17353 - protein, 5 aa, Artificial Sequence
  Description of Artificial Sequence: Synthetic peptide
  XENP018193 vhCDR1
NYWMN

SEQ ID NO: 17354 - protein, 19 aa, Artificial Sequence
  Description of Artificial Sequence: Synthetic peptide
  XENP018193 vhCDR2
EIRLKVNNYATHYAEPVKG

SEQ ID NO: 17355 - protein, 11 aa, Artificial Sequence
  Description of Artificial Sequence: Synthetic peptide
  XENP018193 vhCDR3
YYGNYGGYFDV

SEQ ID NO: 17356 - protein, 214 aa, Artificial Sequence; identical to SEQ ID NO: 16226
  Description of Artificial Sequence: Synthetic polypeptide
  XENP018193 1G6_H1.96_L1_IgG1_PVA_/S267K Light Chain

SEQ ID NO: 17357 - protein, 107 aa, Artificial Sequence; identical to SEQ ID NO: 10923
  Description of Artificial Sequence: Synthetic polypeptide
  VL of XENP018193

SEQ ID NO: 17358 - protein, 11 aa, Artificial Sequence
  Description of Artificial Sequence: Synthetic peptide
  XENP018193 vlCDR1
RASQSVSNDVA

SEQ ID NO: 17359 - protein, 7 aa, Artificial Sequence
  Description of Artificial Sequence: Synthetic peptide
  XENP018193 vlCDR2
YASHRYT

SEQ ID NO: 17360 - protein, 9 aa, Artificial Sequence
  Description of Artificial Sequence: Synthetic peptide
  XENP018193 vlCDR3
QQDYSSPRT

SEQ ID NO: 17361 - protein, 451 aa, Artificial Sequence
  Description of Artificial Sequence: Synthetic polypeptide
  XENP018194 1G6_H1.97_L1_IgG1_PVA_/S267K Heavy Chain
EVQLVESGGGLVKPGGSLRLSCAASGFTFSNYWMNWVRQAPGKGLEWVGEIRLKHNNYATHYAEPVKGRFTISRDDSKSTVYLQMNSLKTEDTAVYYCTRYYGNYGGYFDVWGAGTLVTVSSASTKGPSVFPLAPSSKSTSGGTAALGCLVKDYFPEPVTVSWNSGALTSGVHTFPAVLQSSGLYSLSSVVTVPSSSLGTQTYICNVNHKPSNTKVDKKVEPKSCDKTHTCPPCPAPPVAGPSVFLFPPKPKDTLMISRTPEVTCVVVDVKHEDPEVKFNWYVDGVEVHNAKTKPREEQYNSTYRVVSVLTVLHQDWLNGKEYKCKVSNKALPAPIEKTISKAKGQPREPQVYTLPPSREEMTKNQVSLTCLVKGFYPSDIAVEWESNGQPENNYKTTPPVLDSDGSFFLYSKLTVDKSRWQQGNVFSCSVMHEALHNHYTQKSLSLSPGK

SEQ ID NO: 17362 - protein, 122 aa, Artificial Sequence; identical to SEQ ID NO: 11900
  Description of Artificial Sequence: Synthetic polypeptide
  VH of XENP018194

SEQ ID NO: 17363 - protein, 5 aa, Artificial Sequence
  Description of Artificial Sequence: Synthetic peptide
  XENP018194 vhCDR1
NYWMN

SEQ ID NO: 17364 - protein, 19 aa, Artificial Sequence
  Description of Artificial Sequence: Synthetic peptide
  XENP018194 vhCDR2
EIRLKHNNYATHYAEPVKG

SEQ ID NO: 17365 - protein, 11 aa, Artificial Sequence
  Description of Artificial Sequence: Synthetic peptide
  XENP018194 vhCDR3
YYGNYGGYFDV

SEQ ID NO: 17366 - protein, 214 aa, Artificial Sequence; identical to SEQ ID NO: 16226
  Description of Artificial Sequence: Synthetic polypeptide
  XENP018194 1G6_H1.97_L1_IgG1_PVA_/S267K Light Chain

SEQ ID NO: 17367 - protein, 107 aa, Artificial Sequence; identical to SEQ ID NO: 10923
  Description of Artificial Sequence: Synthetic polypeptide
  VL of XENP018194

SEQ ID NO: 17368 - protein, 11 aa, Artificial Sequence
  Description of Artificial Sequence: Synthetic peptide
  XENP018194 vlCDR1
RASQSVSNDVA

SEQ ID NO: 17369 - protein, 7 aa, Artificial Sequence
  Description of Artificial Sequence: Synthetic peptide
  XENP018194 vlCDR2
YASHRYT

SEQ ID NO: 17370 - protein, 9 aa, Artificial Sequence
  Description of Artificial Sequence: Synthetic peptide
  XENP018194 vlCDR3
QQDYSSPRT

SEQ ID NO: 17371 - protein, 451 aa, Artificial Sequence
  Description of Artificial Sequence: Synthetic polypeptide
  XENP018195 1G6_H1.98_L1_IgG1_PVA_/S267K Heavy Chain
EVQLVESGGGLVKPGGSLRLSCAASGFTFSNYWMNWVRQAPGKGLEWVGEIRLKDNNYATHYAEPVKGRFTISRDDSKSTVYLQMNSLKTEDTAVYYCTRYYGNYGGYFDVWGAGTLVTVSSASTKGPSVFPLAPSSKSTSGGTAALGCLVKDYFPEPVTVSWNSGALTSGVHTFPAVLQSSGLYSLSSVVTVPSSSLGTQTYICNVNHKPSNTKVDKKVEPKSCDKTHTCPPCPAPPVAGPSVFLFPPKPKDTLMISRTPEVTCVVVDVKHEDPEVKFNWYVDGVEVHNAKTKPREEQYNSTYRVVSVLTVLHQDWLNGKEYKCKVSNKALPAPIEKTISKAKGQPREPQVYTLPPSREEMTKNQVSLTCLVKGFYPSDIAVEWESNGQPENNYKTTPPVLDSDGSFFLYSKLTVDKSRWQQGNVFSCSVMHEALHNHYTQKSLSLSPGK

SEQ ID NO: 17372 - protein, 122 aa, Artificial Sequence; identical to SEQ ID NO: 11909
  Description of Artificial Sequence: Synthetic polypeptide
  VH of XENP018195

SEQ ID NO: 17373 - protein, 5 aa, Artificial Sequence
  Description of Artificial Sequence: Synthetic peptide
  XENP018195 vhCDR1
NYWMN

SEQ ID NO: 17374 - protein, 19 aa, Artificial Sequence
  Description of Artificial Sequence: Synthetic peptide
  XENP018195 vhCDR2
EIRLKDNNYATHYAEPVKG

SEQ ID NO: 17375 - protein, 11 aa, Artificial Sequence
  Description of Artificial Sequence: Synthetic peptide
  XENP018195 vhCDR3
YYGNYGGYFDV

SEQ ID NO: 17376 - protein, 214 aa, Artificial Sequence; identical to SEQ ID NO: 16226
  Description of Artificial Sequence: Synthetic polypeptide
  XENP018195 1G6_H1.98_L1_IgG1_PVA_/S267K Light Chain

SEQ ID NO: 17377 - protein, 107 aa, Artificial Sequence; identical to SEQ ID NO: 10923
  Description of Artificial Sequence: Synthetic polypeptide
  VL of XENP018195

SEQ ID NO: 17378 - protein, 11 aa, Artificial Sequence
  Description of Artificial Sequence: Synthetic peptide
  XENP018195 vlCDR1
RASQSVSNDVA

SEQ ID NO: 17379 - protein, 7 aa, Artificial Sequence
  Description of Artificial Sequence: Synthetic peptide
  XENP018195 vlCDR2
YASHRYT

SEQ ID NO: 17380 - protein, 9 aa, Artificial Sequence
  Description of Artificial Sequence: Synthetic peptide
  XENP018195 vlCDR3
QQDYSSPRT

SEQ ID NO: 17381 - protein, 451 aa, Artificial Sequence
  Description of Artificial Sequence: Synthetic polypeptide
  XENP018196 1G6_H1.99_L1_IgG1_PVA_/S267K Heavy Chain
EVQLVESGGGLVKPGGSLRLSCAASGFTFSNYWMNWVRQAPGKGLEWVGEIRLKKNNYATHYAEPVKGRFTISRDDSKSTVYLQMNSLKTEDTAVYYCTRYYGNYGGYFDVWGAGTLVTVSSASTKGPSVFPLAPSSKSTSGGTAALGCLVKDYFPEPVTVSWNSGALTSGVHTFPAVLQSSGLYSLSSVVTVPSSSLGTQTYICNVNHKPSNTKVDKKVEPKSCDKTHTCPPCPAPPVAGPSVFLFPPKPKDTLMISRTPEVTCVVVDVKHEDPEVKFNWYVDGVEVHNAKTKPREEQYNSTYRVVSVLTVLHQDWLNGKEYKCKVSNKALPAPIEKTISKAKGQPREPQVYTLPPSREEMTKNQVSLTCLVKGFYPSDIAVEWESNGQPENNYKTTPPVLDSDGSFFLYSKLTVDKSRWQQGNVFSCSVMHEALHNHYTQKSLSLSPGK

SEQ ID NO: 17382 - protein, 122 aa, Artificial Sequence; identical to SEQ ID NO: 11918
  Description of Artificial Sequence: Synthetic polypeptide
  VH of XENP018196

SEQ ID NO: 17383 - protein, 5 aa, Artificial Sequence
  Description of Artificial Sequence: Synthetic peptide
  XENP018196 vhCDR1
NYWMN

SEQ ID NO: 17384 - protein, 19 aa, Artificial Sequence
  Description of Artificial Sequence: Synthetic peptide
  XENP018196 vhCDR2
EIRLKKNNYATHYAEPVKG

SEQ ID NO: 17385 - protein, 11 aa, Artificial Sequence
  Description of Artificial Sequence: Synthetic peptide
  XENP018196 vhCDR3
YYGNYGGYFDV

SEQ ID NO: 17386 - protein, 214 aa, Artificial Sequence; identical to SEQ ID NO: 16226
  Description of Artificial Sequence: Synthetic polypeptide
  XENP018196 1G6_H1.99_L1_IgG1_PVA_/S267K Light Chain

SEQ ID NO: 17387 - protein, 107 aa, Artificial Sequence; identical to SEQ ID NO: 10923
  Description of Artificial Sequence: Synthetic polypeptide
  VL of XENP018196

SEQ ID NO: 17388 - protein, 11 aa, Artificial Sequence
  Description of Artificial Sequence: Synthetic peptide
  XENP018196 vlCDR1
RASQSVSNDVA

SEQ ID NO: 17389 - protein, 7 aa, Artificial Sequence
  Description of Artificial Sequence: Synthetic peptide
  XENP018196 vlCDR2
YASHRYT

SEQ ID NO: 17390 - protein, 9 aa, Artificial Sequence
  Description of Artificial Sequence: Synthetic peptide
  XENP018196 vlCDR3
QQDYSSPRT

SEQ ID NO: 17391 - protein, 451 aa, Artificial Sequence
  Description of Artificial Sequence: Synthetic polypeptide
  XENP018201 1G6_H1.100_L1_IgG1_PVA_/S267K Heavy Chain
EVQLVESGGGLVKPGGSLRLSCAASGFTFSNYWMNWVRQAPGKGLEWVGEIRLKYNNYATHYAEPVKGRFTISRDDSKSTVYLQMNSLKTEDTAVYYCTRYYGNYGGYFDVWGAGTLVTVSSASTKGPSVFPLAPSSKSTSGGTAALGCLVKDYFPEPVTVSWNSGALTSGVHTFPAVLQSSGLYSLSSVVTVPSSSLGTQTYICNVNHKPSNTKVDKKVEPKSCDKTHTCPPCPAPPVAGPSVFLFPPKPKDTLMISRTPEVTCVVVDVKHEDPEVKFNWYVDGVEVHNAKTKPREEQYNSTYRVVSVLTVLHQDWLNGKEYKCKVSNKALPAPIEKTISKAKGQPREPQVYTLPPSREEMTKNQVSLTCLVKGFYPSDIAVEWESNGQPENNYKTTPPVLDSDGSFFLYSKLTVDKSRWQQGNVFSCSVMHEALHNHYTQKSLSLSPGK

SEQ ID NO: 17392 - protein, 122 aa, Artificial Sequence; identical to SEQ ID NO: 11927
  Description of Artificial Sequence: Synthetic polypeptide
  VH of XENP018201

SEQ ID NO: 17393 - protein, 5 aa, Artificial Sequence
  Description of Artificial Sequence: Synthetic peptide
  XENP018201 vhCDR1
NYWMN

SEQ ID NO: 17394 - protein, 19 aa, Artificial Sequence
  Description of Artificial Sequence: Synthetic peptide
  XENP018201 vhCDR2
EIRLKYNNYATHYAEPVKG

SEQ ID NO: 17395 - protein, 11 aa, Artificial Sequence
  Description of Artificial Sequence: Synthetic peptide
  XENP018201 vhCDR3
YYGNYGGYFDV

SEQ ID NO: 17396 - protein, 214 aa, Artificial Sequence; identical to SEQ ID NO: 16226
  Description of Artificial Sequence: Synthetic polypeptide
  XENP018201 1G6_H1.100_L1_IgG1_PVA_/S267K Light Chain

SEQ ID NO: 17397 - protein, 107 aa, Artificial Sequence; identical to SEQ ID NO: 10923
  Description of Artificial Sequence: Synthetic polypeptide
  VL of XENP018201

SEQ ID NO: 17398 - protein, 11 aa, Artificial Sequence
  Description of Artificial Sequence: Synthetic peptide
  XENP018201 vlCDR1
RASQSVSNDVA

SEQ ID NO: 17399 - protein, 7 aa, Artificial Sequence
  Description of Artificial Sequence: Synthetic peptide
  XENP018201 vlCDR2
YASHRYT

SEQ ID NO: 17400 - protein, 9 aa, Artificial Sequence
  Description of Artificial Sequence: Synthetic peptide
  XENP018201 vlCDR3
QQDYSSPRT

SEQ ID NO: 17401 - protein, 451 aa, Artificial Sequence
  Description of Artificial Sequence: Synthetic polypeptide
  XENP018202 1G6_H1.101_L1_IgG1_PVA_/S267K Heavy Chain
EVQLVESGGGLVKPGGSLRLSCAASGFTFSNYWMNWVRQAPGKGLEWVGEIRLKSDNYATHYAEPVKGRFTISRDDSKSTVYLQMNSLKTEDTAVYYCTRYYGNYGGYFDVWGAGTLVTVSSASTKGPSVFPLAPSSKSTSGGTAALGCLVKDYFPEPVTVSWNSGALTSGVHTFPAVLQSSGLYSLSSVVTVPSSSLGTQTYICNVNHKPSNTKVDKKVEPKSCDKTHTCPPCPAPPVAGPSVFLFPPKPKDTLMISRTPEVTCVVVDVKHEDPEVKFNWYVDGVEVHNAKTKPREEQYNSTYRVVSVLTVLHQDWLNGKEYKCKVSNKALPAPIEKTISKAKGQPREPQVYTLPPSREEMTKNQVSLTCLVKGFYPSDIAVEWESNGQPENNYKTTPPVLDSDGSFFLYSKLTVDKSRWQQGNVFSCSVMHEALHNHYTQKSLSLSPGK

SEQ ID NO: 17402 - protein, 122 aa, Artificial Sequence; identical to SEQ ID NO: 11936
  Description of Artificial Sequence: Synthetic polypeptide
  VH of XENP018202

SEQ ID NO: 17403 - protein, 5 aa, Artificial Sequence
  Description of Artificial Sequence: Synthetic peptide
  XENP018202 vhCDR1
NYWMN

SEQ ID NO: 17404 - protein, 19 aa, Artificial Sequence
  Description of Artificial Sequence: Synthetic peptide
  XENP018202 vhCDR2
EIRLKSDNYATHYAEPVKG

SEQ ID NO: 17405 - protein, 11 aa, Artificial Sequence
  Description of Artificial Sequence: Synthetic peptide
  XENP018202 vhCDR3
YYGNYGGYFDV

SEQ ID NO: 17406 - protein, 214 aa, Artificial Sequence; identical to SEQ ID NO: 16226
  Description of Artificial Sequence: Synthetic polypeptide
  XENP018202 1G6_H1.101_L1_IgG1_PVA_/S267K Light Chain

SEQ ID NO: 17407 - protein, 107 aa, Artificial Sequence; identical to SEQ ID NO: 10923
  Description of Artificial Sequence: Synthetic polypeptide
  VL of XENP018202

SEQ ID NO: 17408 - protein, 11 aa, Artificial Sequence
  Description of Artificial Sequence: Synthetic peptide
  XENP018202 vlCDR1
RASQSVSNDVA

SEQ ID NO: 17409 - protein, 7 aa, Artificial Sequence
  Description of Artificial Sequence: Synthetic peptide
  XENP018202 vlCDR2
YASHRYT

SEQ ID NO: 17410 - protein, 9 aa, Artificial Sequence
  Description of Artificial Sequence: Synthetic peptide
  XENP018202 vlCDR3
QQDYSSPRT

SEQ ID NO: 17411 - protein, 451 aa, Artificial Sequence
  Description of Artificial Sequence: Synthetic polypeptide
  XENP018203 1G6_H1.102_L1_IgG1_PVA_/S267K Heavy Chain
EVQLVESGGGLVKPGGSLRLSCAASGFTFSNYWMNWVRQAPGKGLEWVGEIRLKSHNYATHYAEPVKGRFTISRDDSKSTVYLQMNSLKTEDTAVYYCTRYYGNYGGYFDVWGAGTLVTVSSASTKGPSVFPLAPSSKSTSGGTAALGCLVKDYFPEPVTVSWNSGALTSGVHTFPAVLQSSGLYSLSSVVTVPSSSLGTQTYICNVNHKPSNTKVDKKVEPKSCDKTHTCPPCPAPPVAGPSVFLFPPKPKDTLMISRTPEVTCVVVDVKHEDPEVKFNWYVDGVEVHNAKTKPREEQYNSTYRVVSVLTVLHQDWLNGKEYKCKVSNKALPAPIEKTISKAKGQPREPQVYTLPPSREEMTKNQVSLTCLVKGFYPSDIAVEWESNGQPENNYKTTPPVLDSDGSFFLYSKLTVDKSRWQQGNVFSCSVMHEALHNHYTQKSLSLSPGK

SEQ ID NO: 17412 - protein, 122 aa, Artificial Sequence; identical to SEQ ID NO: 11945
  Description of Artificial Sequence: Synthetic polypeptide
  VH of XENP018203

SEQ ID NO: 17413 - protein, 5 aa, Artificial Sequence
  Description of Artificial Sequence: Synthetic peptide
  XENP018203 vhCDR1
NYWMN

SEQ ID NO: 17414 - protein, 19 aa, Artificial Sequence
  Description of Artificial Sequence: Synthetic peptide
  XENP018203 vhCDR2
EIRLKSHNYATHYAEPVKG

SEQ ID NO: 17415 - protein, 11 aa, Artificial Sequence
  Description of Artificial Sequence: Synthetic peptide
  XENP018203 vhCDR3
YYGNYGGYFDV

SEQ ID NO: 17416 - protein, 214 aa, Artificial Sequence; identical to SEQ ID NO: 16226
  Description of Artificial Sequence: Synthetic polypeptide
  XENP018203 1G6_H1.102_L1_IgG1_PVA_/S267K Light Chain

SEQ ID NO: 17417 - protein, 107 aa, Artificial Sequence; identical to SEQ ID NO: 10923
  Description of Artificial Sequence: Synthetic polypeptide
  VL of XENP018203

SEQ ID NO: 17418 - protein, 11 aa, Artificial Sequence
  Description of Artificial Sequence: Synthetic peptide
  XENP018203 vlCDR1
RASQSVSNDVA

SEQ ID NO: 17419 - protein, 7 aa, Artificial Sequence
  Description of Artificial Sequence: Synthetic peptide
  XENP018203 vlCDR2
YASHRYT

SEQ ID NO: 17420 - protein, 9 aa, Artificial Sequence
  Description of Artificial Sequence: Synthetic peptide
  XENP018203 vlCDR3
QQDYSSPRT

SEQ ID NO: 17421 - protein, 451 aa, Artificial Sequence
  Description of Artificial Sequence: Synthetic polypeptide
  XENP018204 1G6_H1.103_L1_IgG1_PVA_/S267K Heavy Chain
EVQLVESGGGLVKPGGSLRLSCAASGFTFSNYWMNWVRQAPGKGLEWVGEIRLKSENYATHYAEPVKGRFTISRDDSKSTVYLQMNSLKTEDTAVYYCTRYYGNYGGYFDVWGAGTLVTVSSASTKGPSVFPLAPSSKSTSGGTAALGCLVKDYFPEPVTVSWNSGALTSGVHTFPAVLQSSGLYSLSSVVTVPSSSLGTQTYICNVNHKPSNTKVDKKVEPKSCDKTHTCPPCPAPPVAGPSVFLFPPKPKDTLMISRTPEVTCVVVDVKHEDPEVKFNWYVDGVEVHNAKTKPREEQYNSTYRVVSVLTVLHQDWLNGKEYKCKVSNKALPAPIEKTISKAKGQPREPQVYTLPPSREEMTKNQVSLTCLVKGFYPSDIAVEWESNGQPENNYKTTPPVLDSDGSFFLYSKLTVDKSRWQQGNVFSCSVMHEALHNHYTQKSLSLSPGK

SEQ ID NO: 17422 - protein, 122 aa, Artificial Sequence; identical to SEQ ID NO: 11954
  Description of Artificial Sequence: Synthetic polypeptide
  VH of XENP018204

SEQ ID NO: 17423 - protein, 5 aa, Artificial Sequence
  Description of Artificial Sequence: Synthetic peptide
  XENP018204 vhCDR1
NYWMN

SEQ ID NO: 17424 - protein, 19 aa, Artificial Sequence
  Description of Artificial Sequence: Synthetic peptide
  XENP018204 vhCDR2
EIRLKSENYATHYAEPVKG

SEQ ID NO: 17425 - protein, 11 aa, Artificial Sequence
  Description of Artificial Sequence: Synthetic peptide
  XENP018204 vhCDR3
YYGNYGGYFDV

SEQ ID NO: 17426 - protein, 214 aa, Artificial Sequence; identical to SEQ ID NO: 16226
  Description of Artificial Sequence: Synthetic polypeptide
  XENP018204 1G6_H1.103_L1_IgG1_PVA_/S267K Light Chain

SEQ ID NO: 17427 - protein, 107 aa, Artificial Sequence; identical to SEQ ID NO: 10923
  Description of Artificial Sequence: Synthetic polypeptide
  VL of XENP018204

SEQ ID NO: 17428 - protein, 11 aa, Artificial Sequence
  Description of Artificial Sequence: Synthetic peptide
  XENP018204 vlCDR1
RASQSVSNDVA

SEQ ID NO: 17429 - protein, 7 aa, Artificial Sequence
  Description of Artificial Sequence: Synthetic peptide
  XENP018204 vlCDR2
YASHRYT

SEQ ID NO: 17430 - protein, 9 aa, Artificial Sequence
  Description of Artificial Sequence: Synthetic peptide
  XENP018204 vlCDR3
QQDYSSPRT

SEQ ID NO: 17431 - protein, 451 aa, Artificial Sequence
  Description of Artificial Sequence: Synthetic polypeptide
  XENP018205 1G6_H1.104_L1_IgG1_PVA_/S267K Heavy Chain
EVQLVESGGGLVKPGGSLRLSCAASGFTFSNYWMNWVRQAPGKGLEWVGEIRLKSSNYATHYAEPVKGRFTISRDDSKSTVYLQMNSLKTEDTAVYYCTRYYGNYGGYFDVWGAGTLVTVSSASTKGPSVFPLAPSSKSTSGGTAALGCLVKDYFPEPVTVSWNSGALTSGVHTFPAVLQSSGLYSLSSVVTVPSSSLGTQTYICNVNHKPSNTKVDKKVEPKSCDKTHTCPPCPAPPVAGPSVFLFPPKPKDTLMISRTPEVTCVVVDVKHEDPEVKFNWYVDGVEVHNAKTKPREEQYNSTYRVVSVLTVLHQDWLNGKEYKCKVSNKALPAPIEKTISKAKGQPREPQVYTLPPSREEMTKNQVSLTCLVKGFYPSDIAVEWESNGQPENNYKTTPPVLDSDGSFFLYSKLTVDKSRWQQGNVFSCSVMHEALHNHYTQKSLSLSPGK

SEQ ID NO: 17432 - protein, 122 aa, Artificial Sequence; identical to SEQ ID NO: 11963
  Description of Artificial Sequence: Synthetic polypeptide
  VH of XENP018205

SEQ ID NO: 17433 - protein, 5 aa, Artificial Sequence
  Description of Artificial Sequence: Synthetic peptide
  XENP018205 vhCDR1
NYWMN

SEQ ID NO: 17434 - protein, 19 aa, Artificial Sequence
  Description of Artificial Sequence: Synthetic peptide
  XENP018205 vhCDR2
EIRLKSSNYATHYAEPVKG

SEQ ID NO: 17435 - protein, 11 aa, Artificial Sequence
  Description of Artificial Sequence: Synthetic peptide
  XENP018205 vhCDR3
YYGNYGGYFDV

SEQ ID NO: 17436 - protein, 214 aa, Artificial Sequence; identical to SEQ ID NO: 16226
  Description of Artificial Sequence: Synthetic polypeptide
  XENP018205 1G6_H1.104_L1_IgG1_PVA_/S267K Light Chain

SEQ ID NO: 17437 - protein, 107 aa, Artificial Sequence; identical to SEQ ID NO: 10923
  Description of Artificial Sequence: Synthetic polypeptide
  VL of XENP018205

SEQ ID NO: 17438 - protein, 11 aa, Artificial Sequence
  Description of Artificial Sequence: Synthetic peptide
  XENP018205 vlCDR1
RASQSVSNDVA

SEQ ID NO: 17439 - protein, 7 aa, Artificial Sequence
  Description of Artificial Sequence: Synthetic peptide
  XENP018205 vlCDR2
YASHRYT

SEQ ID NO: 17440 - protein, 9 aa, Artificial Sequence
  Description of Artificial Sequence: Synthetic peptide
  XENP018205 vlCDR3
QQDYSSPRT

SEQ ID NO: 17441 - protein, 451 aa, Artificial Sequence
  Description of Artificial Sequence: Synthetic polypeptide
  XENP018206 1G6_H1.105_L1_IgG1_PVA_/S267K Heavy Chain
EVQLVESGGGLVKPGGSLRLSCAASGFTFSNYWMNWVRQAPGKGLEWVGEIRLKSRNYATHYAEPVKGRFTISRDDSKSTVYLQMNSLKTEDTAVYYCTRYYGNYGGYFDVWGAGTLVTVSSASTKGPSVFPLAPSSKSTSGGTAALGCLVKDYFPEPVTVSWNSGALTSGVHTFPAVLQSSGLYSLSSVVTVPSSSLGTQTYICNVNHKPSNTKVDKKVEPKSCDKTHTCPPCPAPPVAGPSVFLFPPKPKDTLMISRTPEVTCVVVDVKHEDPEVKFNWYVDGVEVHNAKTKPREEQYNSTYRVVSVLTVLHQDWLNGKEYKCKVSNKALPAPIEKTISKAKGQPREPQVYTLPPSREEMTKNQVSLTCLVKGFYPSDIAVEWESNGQPENNYKTTPPVLDSDGSFFLYSKLTVDKSRWQQGNVFSCSVMHEALHNHYTQKSLSLSPGK

SEQ ID NO: 17442 - protein, 122 aa, Artificial Sequence; identical to SEQ ID NO: 11972
  Description of Artificial Sequence: Synthetic polypeptide
  VH of XENP018206

SEQ ID NO: 17443 - protein, 5 aa, Artificial Sequence
  Description of Artificial Sequence: Synthetic peptide
  XENP018206 vhCDR1
NYWMN

SEQ ID NO: 17444 - protein, 19 aa, Artificial Sequence
  Description of Artificial Sequence: Synthetic peptide
  XENP018206 vhCDR2
EIRLKSRNYATHYAEPVKG

SEQ ID NO: 17445 - protein, 11 aa, Artificial Sequence
  Description of Artificial Sequence: Synthetic peptide
  XENP018206 vhCDR3
YYGNYGGYFDV

SEQ ID NO: 17446 - protein, 214 aa, Artificial Sequence; identical to SEQ ID NO: 16226
  Description of Artificial Sequence: Synthetic polypeptide
  XENP018206 1G6_H1.105_L1_IgG1_PVA_/S267K Light Chain

SEQ ID NO: 17447 - protein, 107 aa, Artificial Sequence; identical to SEQ ID NO: 10923
  Description of Artificial Sequence: Synthetic polypeptide
  VL of XENP018206

SEQ ID NO: 17448 - protein, 11 aa, Artificial Sequence
  Description of Artificial Sequence: Synthetic peptide
  XENP018206 vlCDR1
RASQSVSNDVA

SEQ ID NO: 17449 - protein, 7 aa, Artificial Sequence
  Description of Artificial Sequence: Synthetic peptide
  XENP018206 vlCDR2
YASHRYT

SEQ ID NO: 17450 - protein, 9 aa, Artificial Sequence
  Description of Artificial Sequence: Synthetic peptide
  XENP018206 vlCDR3
QQDYSSPRT

SEQ ID NO: 17451 - protein, 451 aa, Artificial Sequence
  Description of Artificial Sequence: Synthetic polypeptide
  XENP018207 1G6_H1.106_L1_IgG1_PVA_/S267K Heavy Chain
EVQLVESGGGLVKPGGSLRLSCAASGFTFSNYWMNWVRQAPGKGLEWVGEIRLKSLNYATHYAEPVKGRFTISRDDSKSTVYLQMNSLKTEDTAVYYCTRYYGNYGGYFDVWGAGTLVTVSSASTKGPSVFPLAPSSKSTSGGTAALGCLVKDYFPEPVTVSWNSGALTSGVHTFPAVLQSSGLYSLSSVVTVPSSSLGTQTYICNVNHKPSNTKVDKKVEPKSCDKTHTCPPCPAPPVAGPSVFLFPPKPKDTLMISRTPEVTCVVVDVKHEDPEVKFNWYVDGVEVHNAKTKPREEQYNSTYRVVSVLTVLHQDWLNGKEYKCKVSNKALPAPIEKTISKAKGQPREPQVYTLPPSREEMTKNQVSLTCLVKGFYPSDIAVEWESNGQPENNYKTTPPVLDSDGSFFLYSKLTVDKSRWQQGNVFSCSVMHEALHNHYTQKSLSLSPGK

SEQ ID NO: 17452 - protein, 122 aa, Artificial Sequence; identical to SEQ ID NO: 11981
  Description of Artificial Sequence: Synthetic polypeptide
  VH of XENP018207

SEQ ID NO: 17453 - protein, 5 aa, Artificial Sequence
  Description of Artificial Sequence: Synthetic peptide
  XENP018207 vhCDR1
NYWMN

SEQ ID NO: 17454 - protein, 19 aa, Artificial Sequence
  Description of Artificial Sequence: Synthetic peptide
  XENP018207 vhCDR2
EIRLKSLNYATHYAEPVKG

SEQ ID NO: 17455 - protein, 11 aa, Artificial Sequence
  Description of Artificial Sequence: Synthetic peptide
  XENP018207 vhCDR3
YYGNYGGYFDV

SEQ ID NO: 17456 - protein, 214 aa, Artificial Sequence; identical to SEQ ID NO: 16226
  Description of Artificial Sequence: Synthetic polypeptide
  XENP018207 1G6_H1.106_L1_IgG1_PVA_/S267K Light Chain

SEQ ID NO: 17457 - protein, 107 aa, Artificial Sequence; identical to SEQ ID NO: 10923
  Description of Artificial Sequence: Synthetic polypeptide
  VL of XENP018207

SEQ ID NO: 17458 - protein, 11 aa, Artificial Sequence
  Description of Artificial Sequence: Synthetic peptide
  XENP018207 vlCDR1
RASQSVSNDVA

SEQ ID NO: 17459 - protein, 7 aa, Artificial Sequence
  Description of Artificial Sequence: Synthetic peptide
  XENP018207 vlCDR2
YASHRYT

SEQ ID NO: 17460 - protein, 9 aa, Artificial Sequence
  Description of Artificial Sequence: Synthetic peptide
  XENP018207 vlCDR3
QQDYSSPRT

SEQ ID NO: 17461 - protein, 451 aa, Artificial Sequence
  Description of Artificial Sequence: Synthetic polypeptide
  XENP018208 1G6_H1.107_L1_IgG1_PVA_/S267K Heavy Chain
EVQLVESGGGLVKPGGSLRLSCAASGFTFSNYWMNWVRQAPGKGLEWVGEIRLKSTNYATHYAEPVKGRFTISRDDSKSTVYLQMNSLKTEDTAVYYCTRYYGNYGGYFDVWGAGTLVTVSSASTKGPSVFPLAPSSKSTSGGTAALGCLVKDYFPEPVTVSWNSGALTSGVHTFPAVLQSSGLYSLSSVVTVPSSSLGTQTYICNVNHKPSNTKVDKKVEPKSCDKTHTCPPCPAPPVAGPSVFLFPPKPKDTLMISRTPEVTCVVVDVKHEDPEVKFNWYVDGVEVHNAKTKPREEQYNSTYRVVSVLTVLHQDWLNGKEYKCKVSNKALPAPIEKTISKAKGQPREPQVYTLPPSREEMTKNQVSLTCLVKGFYPSDIAVEWESNGQPENNYKTTPPVLDSDGSFFLYSKLTVDKSRWQQGNVFSCSVMHEALHNHYTQKSLSLSPGK

SEQ ID NO: 17462 - protein, 122 aa, Artificial Sequence; identical to SEQ ID NO: 11990
  Description of Artificial Sequence: Synthetic polypeptide
  VH of XENP018208

SEQ ID NO: 17463 - protein, 5 aa, Artificial Sequence
  Description of Artificial Sequence: Synthetic peptide
  XENP018208 vhCDR1
NYWMN

SEQ ID NO: 17464 - protein, 19 aa, Artificial Sequence
  Description of Artificial Sequence: Synthetic peptide
  XENP018208 vhCDR2
EIRLKSTNYATHYAEPVKG

SEQ ID NO: 17465 - protein, 11 aa, Artificial Sequence
  Description of Artificial Sequence: Synthetic peptide
  XENP018208 vhCDR3
YYGNYGGYFDV

SEQ ID NO: 17466 - protein, 214 aa, Artificial Sequence; identical to SEQ ID NO: 16226
  Description of Artificial Sequence: Synthetic polypeptide
  XENP018208 1G6_H1.107_L1_IgG1_PVA_/S267K Light Chain

SEQ ID NO: 17467 - protein, 107 aa, Artificial Sequence; identical to SEQ ID NO: 10923
  Description of Artificial Sequence: Synthetic polypeptide
  VL of XENP018208

SEQ ID NO: 17468 - protein, 11 aa, Artificial Sequence
  Description of Artificial Sequence: Synthetic peptide
  XENP018208 vlCDR1
RASQSVSNDVA

SEQ ID NO: 17469 - protein, 7 aa, Artificial Sequence
  Description of Artificial Sequence: Synthetic peptide
  XENP018208 vlCDR2
YASHRYT

SEQ ID NO: 17470 - protein, 9 aa, Artificial Sequence
  Description of Artificial Sequence: Synthetic peptide
  XENP018208 vlCDR3
QQDYSSPRT

SEQ ID NO: 17471 - protein, 451 aa, Artificial Sequence
  Description of Artificial Sequence: Synthetic polypeptide
  XENP018209 1G6_H1.108_L1_IgG1_PVA_/S267K Heavy Chain
EVQLVESGGGLVKPGGSLRLSCAASGFTFSNYWMNWVRQAPGKGLEWVGEIRLKSGNYATHYAEPVKGRFTISRDDSKSTVYLQMNSLKTEDTAVYYCTRYYGNYGGYFDVWGAGTLVTVSSASTKGPSVFPLAPSSKSTSGGTAALGCLVKDYFPEPVTVSWNSGALTSGVHTFPAVLQSSGLYSLSSVVTVPSSSLGTQTYICNVNHKPSNTKVDKKVEPKSCDKTHTCPPCPAPPVAGPSVFLFPPKPKDTLMISRTPEVTCVVVDVKHEDPEVKFNWYVDGVEVHNAKTKPREEQYNSTYRVVSVLTVLHQDWLNGKEYKCKVSNKALPAPIEKTISKAKGQPREPQVYTLPPSREEMTKNQVSLTCLVKGFYPSDIAVEWESNGQPENNYKTTPPVLDSDGSFFLYSKLTVDKSRWQQGNVFSCSVMHEALHNHYTQKSLSLSPGK

SEQ ID NO: 17472 - protein, 122 aa, Artificial Sequence; identical to SEQ ID NO: 11999
  Description of Artificial Sequence: Synthetic polypeptide
  VH of XENP018209

SEQ ID NO: 17473 - protein, 5 aa, Artificial Sequence
  Description of Artificial Sequence: Synthetic peptide
  XENP018209 vhCDR1
NYWMN

SEQ ID NO: 17474 - protein, 19 aa, Artificial Sequence
  Description of Artificial Sequence: Synthetic peptide
  XENP018209 vhCDR2
EIRLKSGNYATHYAEPVKG

SEQ ID NO: 17475 - protein, 11 aa, Artificial Sequence
  Description of Artificial Sequence: Synthetic peptide
  XENP018209 vhCDR3
YYGNYGGYFDV

SEQ ID NO: 17476 - protein, 214 aa, Artificial Sequence; identical to SEQ ID NO: 16226
  Description of Artificial Sequence: Synthetic polypeptide
  XENP018209 1G6_H1.108_L1_IgG1_PVA_/S267K Light Chain

SEQ ID NO: 17477 - protein, 107 aa, Artificial Sequence; identical to SEQ ID NO: 10923
  Description of Artificial Sequence: Synthetic polypeptide
  VL of XENP018209

SEQ ID NO: 17478 - protein, 11 aa, Artificial Sequence
  Description of Artificial Sequence: Synthetic peptide
  XENP018209 vlCDR1
RASQSVSNDVA

SEQ ID NO: 17479 - protein, 7 aa, Artificial Sequence
  Description of Artificial Sequence: Synthetic peptide
  XENP018209 vlCDR2
YASHRYT

SEQ ID NO: 17480 - protein, 9 aa, Artificial Sequence
  Description of Artificial Sequence: Synthetic peptide
  XENP018209 vlCDR3
QQDYSSPRT

SEQ ID NO: 17481 - protein, 451 aa, Artificial Sequence
  Description of Artificial Sequence: Synthetic polypeptide
  XENP018210 1G6_H1.109_L1_IgG1_PVA_/S267K Heavy Chain
EVQLVESGGGLVKPGGSLRLSCAASGFTFSNYWMNWVRQAPGKGLEWVGEIRLKSYNYATHYAEPVKGRFTISRDDSKSTVYLQMNSLKTEDTAVYYCTRYYGNYGGYFDVWGAGTLVTVSSASTKGPSVFPLAPSSKSTSGGTAALGCLVKDYFPEPVTVSWNSGALTSGVHTFPAVLQSSGLYSLSSVVTVPSSSLGTQTYICNVNHKPSNTKVDKKVEPKSCDKTHTCPPCPAPPVAGPSVFLFPPKPKDTLMISRTPEVTCVVVDVKHEDPEVKFNWYVDGVEVHNAKTKPREEQYNSTYRVVSVLTVLHQDWLNGKEYKCKVSNKALPAPIEKTISKAKGQPREPQVYTLPPSREEMTKNQVSLTCLVKGFYPSDIAVEWESNGQPENNYKTTPPVLDSDGSFFLYSKLTVDKSRWQQGNVFSCSVMHEALHNHYTQKSLSLSPGK

SEQ ID NO: 17482 - protein, 122 aa, Artificial Sequence; identical to SEQ ID NO: 12008
  Description of Artificial Sequence: Synthetic polypeptide
  VH of XENP018210

SEQ ID NO: 17483 - protein, 5 aa, Artificial Sequence
  Description of Artificial Sequence: Synthetic peptide
  XENP018210 vhCDR1
NYWMN

SEQ ID NO: 17484 - protein, 19 aa, Artificial Sequence
  Description of Artificial Sequence: Synthetic peptide
  XENP018210 vhCDR2
EIRLKSYNYATHYAEPVKG

SEQ ID NO: 17485 - protein, 11 aa, Artificial Sequence
  Description of Artificial Sequence: Synthetic peptide
  XENP018210 vhCDR3
YYGNYGGYFDV

SEQ ID NO: 17486 - protein, 214 aa, Artificial Sequence; identical to SEQ ID NO: 16226
  Description of Artificial Sequence: Synthetic polypeptide
  XENP018210 1G6_H1.109_L1_IgG1_PVA_/S267K Light Chain

SEQ ID NO: 17487 - protein, 107 aa, Artificial Sequence; identical to SEQ ID NO: 10923
  Description of Artificial Sequence: Synthetic polypeptide
  VL of XENP018210

SEQ ID NO: 17488 - protein, 11 aa, Artificial Sequence
  Description of Artificial Sequence: Synthetic peptide
  XENP018210 vlCDR1
RASQSVSNDVA

SEQ ID NO: 17489 - protein, 7 aa, Artificial Sequence
  Description of Artificial Sequence: Synthetic peptide
  XENP018210 vlCDR2
YASHRYT

SEQ ID NO: 17490 - protein, 9 aa, Artificial Sequence
  Description of Artificial Sequence: Synthetic peptide
  XENP018210 vlCDR3
QQDYSSPRT

SEQ ID NO: 17491 - protein, 451 aa, Artificial Sequence
  Description of Artificial Sequence: Synthetic polypeptide
  XENP018211 1G6_H1.110_L1_IgG1_PVA_/S267K Heavy Chain
EVQLVESGGGLVKPGGSLRLSCAASGFTFSNYWMNWVRQAPGKGLEWVGEIRLKSNDYATHYAEPVKGRFTISRDDSKSTVYLQMNSLKTEDTAVYYCTRYYGNYGGYFDVWGAGTLVTVSSASTKGPSVFPLAPSSKSTSGGTAALGCLVKDYFPEPVTVSWNSGALTSGVHTFPAVLQSSGLYSLSSVVTVPSSSLGTQTYICNVNHKPSNTKVDKKVEPKSCDKTHTCPPCPAPPVAGPSVFLFPPKPKDTLMISRTPEVTCVVVDVKHEDPEVKFNWYVDGVEVHNAKTKPREEQYNSTYRVVSVLTVLHQDWLNGKEYKCKVSNKALPAPIEKTISKAKGQPREPQVYTLPPSREEMTKNQVSLTCLVKGFYPSDIAVEWESNGQPENNYKTTPPVLDSDGSFFLYSKLTVDKSRWQQGNVFSCSVMHEALHNHYTQKSLSLSPGK

SEQ ID NO: 17492 - protein, 122 aa, Artificial Sequence; identical to SEQ ID NO: 12017
  Description of Artificial Sequence: Synthetic polypeptide
  VH of XENP018211

SEQ ID NO: 17493 - protein, 5 aa, Artificial Sequence
  Description of Artificial Sequence: Synthetic peptide
  XENP018211 vhCDR1
NYWMN

SEQ ID NO: 17494 - protein, 19 aa, Artificial Sequence
  Description of Artificial Sequence: Synthetic peptide
  XENP018211 vhCDR2
EIRLKSNDYATHYAEPVKG

SEQ ID NO: 17495 - protein, 11 aa, Artificial Sequence
  Description of Artificial Sequence: Synthetic peptide
  XENP018211 vhCDR3
YYGNYGGYFDV

SEQ ID NO: 17496 - protein, 214 aa, Artificial Sequence; identical to SEQ ID NO: 16226
  Description of Artificial Sequence: Synthetic polypeptide
  XENP018211 1G6_H1.110_L1_IgG1_PVA_/S267K Light Chain

SEQ ID NO: 17497 - protein, 107 aa, Artificial Sequence; identical to SEQ ID NO: 10923
  Description of Artificial Sequence: Synthetic polypeptide
  VL of XENP018211

SEQ ID NO: 17498 - protein, 11 aa, Artificial Sequence
  Description of Artificial Sequence: Synthetic peptide
  XENP018211 vlCDR1
RASQSVSNDVA

SEQ ID NO: 17499 - protein, 7 aa, Artificial Sequence
  Description of Artificial Sequence: Synthetic peptide
  XENP018211 vlCDR2
YASHRYT

SEQ ID NO: 17500 - protein, 9 aa, Artificial Sequence
  Description of Artificial Sequence: Synthetic peptide
  XENP018211 vlCDR3
QQDYSSPRT

SEQ ID NO: 17501 - protein, 451 aa, Artificial Sequence
  Description of Artificial Sequence: Synthetic polypeptide
  XENP018212 1G6_H1.111_L1_IgG1_PVA_/S267K Heavy Chain
EVQLVESGGGLVKPGGSLRLSCAASGFTFSNYWMNWVRQAPGKGLEWVGEIRLKSNHYATHYAEPVKGRFTISRDDSKSTVYLQMNSLKTEDTAVYYCTRYYGNYGGYFDVWGAGTLVTVSSASTKGPSVFPLAPSSKSTSGGTAALGCLVKDYFPEPVTVSWNSGALTSGVHTFPAVLQSSGLYSLSSVVTVPSSSLGTQTYICNVNHKPSNTKVDKKVEPKSCDKTHTCPPCPAPPVAGPSVFLFPPKPKDTLMISRTPEVTCVVVDVKHEDPEVKFNWYVDGVEVHNAKTKPREEQYNSTYRVVSVLTVLHQDWLNGKEYKCKVSNKALPAPIEKTISKAKGQPREPQVYTLPPSREEMTKNQVSLTCLVKGFYPSDIAVEWESNGQPENNYKTTPPVLDSDGSFFLYSKLTVDKSRWQQGNVFSCSVMHEALHNHYTQKSLSLSPGK

SEQ ID NO: 17502 - protein, 122 aa, Artificial Sequence; identical to SEQ ID NO: 12026
  Description of Artificial Sequence: Synthetic polypeptide
  VH of XENP018212

SEQ ID NO: 17503 - protein, 5 aa, Artificial Sequence
  Description of Artificial Sequence: Synthetic peptide
  XENP018212 vhCDR1
NYWMN

SEQ ID NO: 17504 - protein, 19 aa, Artificial Sequence
  Description of Artificial Sequence: Synthetic peptide
  XENP018212 vhCDR2
EIRLKSNHYATHYAEPVKG

SEQ ID NO: 17505 - protein, 11 aa, Artificial Sequence
  Description of Artificial Sequence: Synthetic peptide
  XENP018212 vhCDR3
YYGNYGGYFDV

SEQ ID NO: 17506 - protein, 214 aa, Artificial Sequence; identical to SEQ ID NO: 16226
  Description of Artificial Sequence: Synthetic polypeptide
  XENP018212 1G6_H1.111_L1_IgG1_PVA_/S267K Light Chain

SEQ ID NO: 17507 - protein, 107 aa, Artificial Sequence; identical to SEQ ID NO: 10923
  Description of Artificial Sequence: Synthetic polypeptide
  VL of XENP018212

SEQ ID NO: 17508 - protein, 11 aa, Artificial Sequence
  Description of Artificial Sequence: Synthetic peptide
  XENP018212 vlCDR1
RASQSVSNDVA

SEQ ID NO: 17509 - protein, 7 aa, Artificial Sequence
  Description of Artificial Sequence: Synthetic peptide
  XENP018212 vlCDR2
YASHRYT

SEQ ID NO: 17510 - protein, 9 aa, Artificial Sequence
  Description of Artificial Sequence: Synthetic peptide
  XENP018212 vlCDR3
QQDYSSPRT

SEQ ID NO: 17511 - protein, 451 aa, Artificial Sequence
  Description of Artificial Sequence: Synthetic polypeptide
  XENP018213 1G6_H1.112_L1_IgG1_PVA_/S267K Heavy Chain
EVQLVESGGGLVKPGGSLRLSCAASGFTFSNYWMNWVRQAPGKGLEWVGEIRLKSNEYATHYAEPVKGRFTISRDDSKSTVYLQMNSLKTEDTAVYYCTRYYGNYGGYFDVWGAGTLVTVSSASTKGPSVFPLAPSSKSTSGGTAALGCLVKDYFPEPVTVSWNSGALTSGVHTFPAVLQSSGLYSLSSVVTVPSSSLGTQTYICNVNHKPSNTKVDKKVEPKSCDKTHTCPPCPAPPVAGPSVFLFPPKPKDTLMISRTPEVTCVVVDVKHEDPEVKFNWYVDGVEVHNAKTKPREEQYNSTYRVVSVLTVLHQDWLNGKEYKCKVSNKALPAPIEKTISKAKGQPREPQVYTLPPSREEMTKNQVSLTCLVKGFYPSDIAVEWESNGQPENNYKTTPPVLDSDGSFFLYSKLTVDKSRWQQGNVFSCSVMHEALHNHYTQKSLSLSPGK

SEQ ID NO: 17512 - protein, 122 aa, Artificial Sequence; identical to SEQ ID NO: 12035
  Description of Artificial Sequence: Synthetic polypeptide
  VH of XENP018213

SEQ ID NO: 17513 - protein, 5 aa, Artificial Sequence
  Description of Artificial Sequence: Synthetic peptide
  XENP018213 vhCDR1
NYWMN

SEQ ID NO: 17514 - protein, 19 aa, Artificial Sequence
  Description of Artificial Sequence: Synthetic peptide
  XENP018213 vhCDR2
EIRLKSNEYATHYAEPVKG

SEQ ID NO: 17515 - protein, 11 aa, Artificial Sequence
  Description of Artificial Sequence: Synthetic peptide
  XENP018213 vhCDR3
YYGNYGGYFDV

SEQ ID NO: 17516 - protein, 214 aa, Artificial Sequence; identical to SEQ ID NO: 16226
  Description of Artificial Sequence: Synthetic polypeptide
  XENP018213 1G6_H1.112_L1_IgG1_PVA_/S267K Light Chain

SEQ ID NO: 17517 - protein, 107 aa, Artificial Sequence; identical to SEQ ID NO: 10923
  Description of Artificial Sequence: Synthetic polypeptide
  VL of XENP018213

SEQ ID NO: 17518 - protein, 11 aa, Artificial Sequence
  Description of Artificial Sequence: Synthetic peptide
  XENP018213 vlCDR1
RASQSVSNDVA

SEQ ID NO: 17519 - protein, 7 aa, Artificial Sequence
  Description of Artificial Sequence: Synthetic peptide
  XENP018213 vlCDR2
YASHRYT

SEQ ID NO: 17520 - protein, 9 aa, Artificial Sequence
  Description of Artificial Sequence: Synthetic peptide
  XENP018213 vlCDR3
QQDYSSPRT

SEQ ID NO: 17521 - protein, 451 aa, Artificial Sequence
  Description of Artificial Sequence: Synthetic polypeptide
  XENP018214 1G6_H1.113_L1_IgG1_PVA_/S267K Heavy Chain
EVQLVESGGGLVKPGGSLRLSCAASGFTFSNYWMNWVRQAPGKGLEWVGEIRLKSNSYATHYAEPVKGRFTISRDDSKSTVYLQMNSLKTEDTAVYYCTRYYGNYGGYFDVWGAGTLVTVSSASTKGPSVFPLAPSSKSTSGGTAALGCLVKDYFPEPVTVSWNSGALTSGVHTFPAVLQSSGLYSLSSVVTVPSSSLGTQTYICNVNHKPSNTKVDKKVEPKSCDKTHTCPPCPAPPVAGPSVFLFPPKPKDTLMISRTPEVTCVVVDVKHEDPEVKFNWYVDGVEVHNAKTKPREEQYNSTYRVVSVLTVLHQDWLNGKEYKCKVSNKALPAPIEKTISKAKGQPREPQVYTLPPSREEMTKNQVSLTCLVKGFYPSDIAVEWESNGQPENNYKTTPPVLDSDGSFFLYSKLTVDKSRWQQGNVFSCSVMHEALHNHYTQKSLSLSPGK

SEQ ID NO: 17522 - protein, 122 aa, Artificial Sequence; identical to SEQ ID NO: 12044
  Description of Artificial Sequence: Synthetic polypeptide
  VH of XENP018214

SEQ ID NO: 17523 - protein, 5 aa, Artificial Sequence
  Description of Artificial Sequence: Synthetic peptide
  XENP018214 vhCDR1
NYWMN

SEQ ID NO: 17524 - protein, 19 aa, Artificial Sequence
  Description of Artificial Sequence: Synthetic peptide
  XENP018214 vhCDR2
EIRLKSNSYATHYAEPVKG

SEQ ID NO: 17525 - protein, 11 aa, Artificial Sequence
  Description of Artificial Sequence: Synthetic peptide
  XENP018214 vhCDR3
YYGNYGGYFDV

SEQ ID NO: 17526 - protein, 214 aa, Artificial Sequence; identical to SEQ ID NO: 16226
  Description of Artificial Sequence: Synthetic polypeptide
  XENP018214 1G6_H1.113_L1_IgG1_PVA_/S267K Light Chain

SEQ ID NO: 17527 - protein, 107 aa, Artificial Sequence; identical to SEQ ID NO: 10923
  Description of Artificial Sequence: Synthetic polypeptide
  VL of XENP018214

SEQ ID NO: 17528 - protein, 11 aa, Artificial Sequence
  Description of Artificial Sequence: Synthetic peptide
  XENP018214 vlCDR1
RASQSVSNDVA

SEQ ID NO: 17529 - protein, 7 aa, Artificial Sequence
  Description of Artificial Sequence: Synthetic peptide
  XENP018214 vlCDR2
YASHRYT

SEQ ID NO: 17530 - protein, 9 aa, Artificial Sequence
  Description of Artificial Sequence: Synthetic peptide
  XENP018214 vlCDR3
QQDYSSPRT

SEQ ID NO: 17531 - protein, 451 aa, Artificial Sequence
  Description of Artificial Sequence: Synthetic polypeptide
  XENP018215 1G6_H1.114_L1_IgG1_PVA_/S267K Heavy Chain
EVQLVESGGGLVKPGGSLRLSCAASGFTFSNYWMNWVRQAPGKGLEWVGEIRLKSNRYATHYAEPVKGRFTISRDDSKSTVYLQMNSLKTEDTAVYYCTRYYGNYGGYFDVWGAGTLVTVSSASTKGPSVFPLAPSSKSTSGGTAALGCLVKDYFPEPVTVSWNSGALTSGVHTFPAVLQSSGLYSLSSVVTVPSSSLGTQTYICNVNHKPSNTKVDKKVEPKSCDKTHTCPPCPAPPVAGPSVFLFPPKPKDTLMISRTPEVTCVVVDVKHEDPEVKFNWYVDGVEVHNAKTKPREEQYNSTYRVVSVLTVLHQDWLNGKEYKCKVSNKALPAPIEKTISKAKGQPREPQVYTLPPSREEMTKNQVSLTCLVKGFYPSDIAVEWESNGQPENNYKTTPPVLDSDGSFFLYSKLTVDKSRWQQGNVFSCSVMHEALHNHYTQKSLSLSPGK

SEQ ID NO: 17532 - protein, 122 aa, Artificial Sequence; identical to SEQ ID NO: 12053
  Description of Artificial Sequence: Synthetic polypeptide
  VH of XENP018215

SEQ ID NO: 17533 - protein, 5 aa, Artificial Sequence
  Description of Artificial Sequence: Synthetic peptide
  XENP018215 vhCDR1
NYWMN

SEQ ID NO: 17534 - protein, 19 aa, Artificial Sequence
  Description of Artificial Sequence: Synthetic peptide
  XENP018215 vhCDR2
EIRLKSNRYATHYAEPVKG

SEQ ID NO: 17535 - protein, 11 aa, Artificial Sequence
  Description of Artificial Sequence: Synthetic peptide
  XENP018215 vhCDR3
YYGNYGGYFDV

SEQ ID NO: 17536 - protein, 214 aa, Artificial Sequence; identical to SEQ ID NO: 16226
  Description of Artificial Sequence: Synthetic polypeptide
  XENP018215 1G6_H1.114_L1_IgG1_PVA_/S267K Light Chain

SEQ ID NO: 17537 - protein, 107 aa, Artificial Sequence; identical to SEQ ID NO: 10923
  Description of Artificial Sequence: Synthetic polypeptide
  VL of XENP018215

SEQ ID NO: 17538 - protein, 11 aa, Artificial Sequence
  Description of Artificial Sequence: Synthetic peptide
  XENP018215 vlCDR1
RASQSVSNDVA

SEQ ID NO: 17539 - protein, 7 aa, Artificial Sequence
  Description of Artificial Sequence: Synthetic peptide
  XENP018215 vlCDR2
YASHRYT

SEQ ID NO: 17540 - protein, 9 aa, Artificial Sequence
  Description of Artificial Sequence: Synthetic peptide
  XENP018215 vlCDR3
QQDYSSPRT

SEQ ID NO: 17541 - protein, 451 aa, Artificial Sequence
  Description of Artificial Sequence: Synthetic polypeptide
  XENP018216 1G6_H1.115_L1_IgG1_PVA_/S267K Heavy Chain
EVQLVESGGGLVKPGGSLRLSCAASGFTFSNYWMNWVRQAPGKGLEWVGEIRLKSNLYATHYAEPVKGRFTISRDDSKSTVYLQMNSLKTEDTAVYYCTRYYGNYGGYFDVWGAGTLVTVSSASTKGPSVFPLAPSSKSTSGGTAALGCLVKDYFPEPVTVSWNSGALTSGVHTFPAVLQSSGLYSLSSVVTVPSSSLGTQTYICNVNHKPSNTKVDKKVEPKSCDKTHTCPPCPAPPVAGPSVFLFPPKPKDTLMISRTPEVTCVVVDVKHEDPEVKFNWYVDGVEVHNAKTKPREEQYNSTYRVVSVLTVLHQDWLNGKEYKCKVSNKALPAPIEKTISKAKGQPREPQVYTLPPSREEMTKNQVSLTCLVKGFYPSDIAVEWESNGQPENNYKTTPPVLDSDGSFFLYSKLTVDKSRWQQGNVFSCSVMHEALHNHYTQKSLSLSPGK

SEQ ID NO: 17542 - protein, 122 aa, Artificial Sequence; identical to SEQ ID NO: 12062
  Description of Artificial Sequence: Synthetic polypeptide
  VH of XENP018216

SEQ ID NO: 17543 - protein, 5 aa, Artificial Sequence
  Description of Artificial Sequence: Synthetic peptide
  XENP018216 vhCDR1
NYWMN

SEQ ID NO: 17544 - protein, 19 aa, Artificial Sequence
  Description of Artificial Sequence: Synthetic peptide
  XENP018216 vhCDR2
EIRLKSNLYATHYAEPVKG

SEQ ID NO: 17545 - protein, 11 aa, Artificial Sequence
  Description of Artificial Sequence: Synthetic peptide
  XENP018216 vhCDR3
YYGNYGGYFDV

SEQ ID NO: 17546 - protein, 214 aa, Artificial Sequence; identical to SEQ ID NO: 16226
  Description of Artificial Sequence: Synthetic polypeptide
  XENP018216 1G6_H1.115_L1_IgG1_PVA_/S267K Light Chain

SEQ ID NO: 17547 - protein, 107 aa, Artificial Sequence; identical to SEQ ID NO: 10923
  Description of Artificial Sequence: Synthetic polypeptide
  VL of XENP018216

SEQ ID NO: 17548 - protein, 11 aa, Artificial Sequence
  Description of Artificial Sequence: Synthetic peptide
  XENP018216 vlCDR1
RASQSVSNDVA

SEQ ID NO: 17549 - protein, 7 aa, Artificial Sequence
  Description of Artificial Sequence: Synthetic peptide
  XENP018216 vlCDR2
YASHRYT

SEQ ID NO: 17550 - protein, 9 aa, Artificial Sequence
  Description of Artificial Sequence: Synthetic peptide
  XENP018216 vlCDR3
QQDYSSPRT

SEQ ID NO: 17551 - protein, 451 aa, Artificial Sequence
  Description of Artificial Sequence: Synthetic polypeptide
  XENP018217 1G6_H1.116_L1_IgG1_PVA_/S267K Heavy Chain
EVQLVESGGGLVKPGGSLRLSCAASGFTFSNYWMNWVRQAPGKGLEWVGEIRLKSNTYATHYAEPVKGRFTISRDDSKSTVYLQMNSLKTEDTAVYYCTRYYGNYGGYFDVWGAGTLVTVSSASTKGPSVFPLAPSSKSTSGGTAALGCLVKDYFPEPVTVSWNSGALTSGVHTFPAVLQSSGLYSLSSVVTVPSSSLGTQTYICNVNHKPSNTKVDKKVEPKSCDKTHTCPPCPAPPVAGPSVFLFPPKPKDTLMISRTPEVTCVVVDVKHEDPEVKFNWYVDGVEVHNAKTKPREEQYNSTYRVVSVLTVLHQDWLNGKEYKCKVSNKALPAPIEKTISKAKGQPREPQVYTLPPSREEMTKNQVSLTCLVKGFYPSDIAVEWESNGQPENNYKTTPPVLDSDGSFFLYSKLTVDKSRWQQGNVFSCSVMHEALHNHYTQKSLSLSPGK

SEQ ID NO: 17552 - protein, 122 aa, Artificial Sequence; identical to SEQ ID NO: 12071
  Description of Artificial Sequence: Synthetic polypeptide
  VH of XENP018217

SEQ ID NO: 17553 - protein, 5 aa, Artificial Sequence
  Description of Artificial Sequence: Synthetic peptide
  XENP018217 vhCDR1
NYWMN

SEQ ID NO: 17554 - protein, 19 aa, Artificial Sequence
  Description of Artificial Sequence: Synthetic peptide
  XENP018217 vhCDR2
EIRLKSNTYATHYAEPVKG

SEQ ID NO: 17555 - protein, 11 aa, Artificial Sequence
  Description of Artificial Sequence: Synthetic peptide
  XENP018217 vhCDR3
YYGNYGGYFDV

SEQ ID NO: 17556 - protein, 214 aa, Artificial Sequence; identical to SEQ ID NO: 16226
  Description of Artificial Sequence: Synthetic polypeptide
  XENP018217 1G6_H1.116_L1_IgG1_PVA_/S267K Light Chain

SEQ ID NO: 17557 - protein, 107 aa, Artificial Sequence; identical to SEQ ID NO: 10923
  Description of Artificial Sequence: Synthetic polypeptide
  VL of XENP018217

SEQ ID NO: 17558 - protein, 11 aa, Artificial Sequence
  Description of Artificial Sequence: Synthetic peptide
  XENP018217 vlCDR1
RASQSVSNDVA

SEQ ID NO: 17559 - protein, 7 aa, Artificial Sequence
  Description of Artificial Sequence: Synthetic peptide
  XENP018217 vlCDR2
YASHRYT

SEQ ID NO: 17560 - protein, 9 aa, Artificial Sequence
  Description of Artificial Sequence: Synthetic peptide
  XENP018217 vlCDR3
QQDYSSPRT

SEQ ID NO: 17561 - protein, 451 aa, Artificial Sequence
  Description of Artificial Sequence: Synthetic polypeptide
  XENP018218 1G6_H1.117_L1_IgG1_PVA_/S267K Heavy Chain
EVQLVESGGGLVKPGGSLRLSCAASGFTFSNYWMNWVRQAPGKGLEWVGEIRLKSNGYATHYAEPVKGRFTISRDDSKSTVYLQMNSLKTEDTAVYYCTRYYGNYGGYFDVWGAGTLVTVSSASTKGPSVFPLAPSSKSTSGGTAALGCLVKDYFPEPVTVSWNSGALTSGVHTFPAVLQSSGLYSLSSVVTVPSSSLGTQTYICNVNHKPSNTKVDKKVEPKSCDKTHTCPPCPAPPVAGPSVFLFPPKPKDTLMISRTPEVTCVVVDVKHEDPEVKFNWYVDGVEVHNAKTKPREEQYNSTYRVVSVLTVLHQDWLNGKEYKCKVSNKALPAPIEKTISKAKGQPREPQVYTLPPSREEMTKNQVSLTCLVKGFYPSDIAVEWESNGQPENNYKTTPPVLDSDGSFFLYSKLTVDKSRWQQGNVFSCSVMHEALHNHYTQKSLSLSPGK

SEQ ID NO: 17562 - protein, 122 aa, Artificial Sequence; identical to SEQ ID NO: 12080
  Description of Artificial Sequence: Synthetic polypeptide
  VH of XENP018218

SEQ ID NO: 17563 - protein, 5 aa, Artificial Sequence
  Description of Artificial Sequence: Synthetic peptide
  XENP018218 vhCDR1
NYWMN

SEQ ID NO: 17564 - protein, 19 aa, Artificial Sequence
  Description of Artificial Sequence: Synthetic peptide
  XENP018218 vhCDR2
EIRLKSNGYATHYAEPVKG

SEQ ID NO: 17565 - protein, 11 aa, Artificial Sequence
  Description of Artificial Sequence: Synthetic peptide
  XENP018218 vhCDR3
YYGNYGGYFDV

SEQ ID NO: 17566 - protein, 214 aa, Artificial Sequence; identical to SEQ ID NO: 16226
  Description of Artificial Sequence: Synthetic polypeptide
  XENP018218 1G6_H1.117_L1_IgG1_PVA_/S267K Light Chain

SEQ ID NO: 17567 - protein, 107 aa, Artificial Sequence; identical to SEQ ID NO: 10923
  Description of Artificial Sequence: Synthetic polypeptide
  VL of XENP018218

SEQ ID NO: 17568 - protein, 11 aa, Artificial Sequence
  Description of Artificial Sequence: Synthetic peptide
  XENP018218 vlCDR1
RASQSVSNDVA

SEQ ID NO: 17569 - protein, 7 aa, Artificial Sequence
  Description of Artificial Sequence: Synthetic peptide
  XENP018218 vlCDR2
YASHRYT

SEQ ID NO: 17570 - protein, 9 aa, Artificial Sequence
  Description of Artificial Sequence: Synthetic peptide
  XENP018218 vlCDR3
QQDYSSPRT

SEQ ID NO: 17571 - protein, 451 aa, Artificial Sequence
  Description of Artificial Sequence: Synthetic polypeptide
  XENP018219 1G6_H1.118_L1_IgG1_PVA_/S267K Heavy Chain
EVQLVESGGGLVKPGGSLRLSCAASGFTFSNYWMNWVRQAPGKGLEWVGEIRLKSNYYATHYAEPVKGRFTISRDDSKSTVYLQMNSLKTEDTAVYYCTRYYGNYGGYFDVWGAGTLVTVSSASTKGPSVFPLAPSSKSTSGGTAALGCLVKDYFPEPVTVSWNSGALTSGVHTFPAVLQSSGLYSLSSVVTVPSSSLGTQTYICNVNHKPSNTKVDKKVEPKSCDKTHTCPPCPAPPVAGPSVFLFPPKPKDTLMISRTPEVTCVVVDVKHEDPEVKFNWYVDGVEVHNAKTKPREEQYNSTYRVVSVLTVLHQDWLNGKEYKCKVSNKALPAPIEKTISKAKGQPREPQVYTLPPSREEMTKNQVSLTCLVKGFYPSDIAVEWESNGQPENNYKTTPPVLDSDGSFFLYSKLTVDKSRWQQGNVFSCSVMHEALHNHYTQKSLSLSPGK

SEQ ID NO: 17572 - protein, 122 aa, Artificial Sequence; identical to SEQ ID NO: 12089
  Description of Artificial Sequence: Synthetic polypeptide
  VH of XENP018219

SEQ ID NO: 17573 - protein, 5 aa, Artificial Sequence
  Description of Artificial Sequence: Synthetic peptide
  XENP018219 vhCDR1
NYWMN

SEQ ID NO: 17574 - protein, 19 aa, Artificial Sequence
  Description of Artificial Sequence: Synthetic peptide
  XENP018219 vhCDR2
EIRLKSNYYATHYAEPVKG

SEQ ID NO: 17575 - protein, 11 aa, Artificial Sequence
  Description of Artificial Sequence: Synthetic peptide
  XENP018219 vhCDR3
YYGNYGGYFDV

SEQ ID NO: 17576 - protein, 214 aa, Artificial Sequence; identical to SEQ ID NO: 16226
  Description of Artificial Sequence: Synthetic polypeptide
  XENP018219 1G6_H1.118_L1_IgG1_PVA_/S267K Light Chain

SEQ ID NO: 17577 - protein, 107 aa, Artificial Sequence; identical to SEQ ID NO: 10923
  Description of Artificial Sequence: Synthetic polypeptide
  VL of XENP018219

SEQ ID NO: 17578 - protein, 11 aa, Artificial Sequence
  Description of Artificial Sequence: Synthetic peptide
  XENP018219 vlCDR1
RASQSVSNDVA

SEQ ID NO: 17579 - protein, 7 aa, Artificial Sequence
  Description of Artificial Sequence: Synthetic peptide
  XENP018219 vlCDR2
YASHRYT

SEQ ID NO: 17580 - protein, 9 aa, Artificial Sequence
  Description of Artificial Sequence: Synthetic peptide
  XENP018219 vlCDR3
QQDYSSPRT

SEQ ID NO: 17581 - protein, 451 aa, Artificial Sequence
  Description of Artificial Sequence: Synthetic polypeptide
  XENP018220 1G6_H1.119_L1_IgG1_PVA_/S267K Heavy Chain
EVQLVESGGGLVKPGGSLRLSCAASGFTFSNYWMNWVRQAPGKGLEWVGEIRLKSNNFATHYAEPVKGRFTISRDDSKSTVYLQMNSLKTEDTAVYYCTRYYGNYGGYFDVWGAGTLVTVSSASTKGPSVFPLAPSSKSTSGGTAALGCLVKDYFPEPVTVSWNSGALTSGVHTFPAVLQSSGLYSLSSVVTVPSSSLGTQTYICNVNHKPSNTKVDKKVEPKSCDKTHTCPPCPAPPVAGPSVFLFPPKPKDTLMISRTPEVTCVVVDVKHEDPEVKFNWYVDGVEVHNAKTKPREEQYNSTYRVVSVLTVLHQDWLNGKEYKCKVSNKALPAPIEKTISKAKGQPREPQVYTLPPSREEMTKNQVSLTCLVKGFYPSDIAVEWESNGQPENNYKTTPPVLDSDGSFFLYSKLTVDKSRWQQGNVFSCSVMHEALHNHYTQKSLSLSPGK

SEQ ID NO: 17582 - protein, 122 aa, Artificial Sequence; identical to SEQ ID NO: 12098
  Description of Artificial Sequence: Synthetic polypeptide
  VH of XENP018220

SEQ ID NO: 17583 - protein, 5 aa, Artificial Sequence
  Description of Artificial Sequence: Synthetic peptide
  XENP018220 vhCDR1
NYWMN

SEQ ID NO: 17584 - protein, 19 aa, Artificial Sequence
  Description of Artificial Sequence: Synthetic peptide
  XENP018220 vhCDR2
EIRLKSNNFATHYAEPVKG

SEQ ID NO: 17585 - protein, 11 aa, Artificial Sequence
  Description of Artificial Sequence: Synthetic peptide
  XENP018220 vhCDR3
YYGNYGGYFDV

SEQ ID NO: 17586 - protein, 214 aa, Artificial Sequence; identical to SEQ ID NO: 16226
  Description of Artificial Sequence: Synthetic polypeptide
  XENP018220 1G6_H1.119_L1_IgG1_PVA_/S267K Light Chain

SEQ ID NO: 17587 - protein, 107 aa, Artificial Sequence; identical to SEQ ID NO: 10923
  Description of Artificial Sequence: Synthetic polypeptide
  VL of XENP018220

SEQ ID NO: 17588 - protein, 11 aa, Artificial Sequence
  Description of Artificial Sequence: Synthetic peptide
  XENP018220 vlCDR1
RASQSVSNDVA

SEQ ID NO: 17589 - protein, 7 aa, Artificial Sequence
  Description of Artificial Sequence: Synthetic peptide
  XENP018220 vlCDR2
YASHRYT

SEQ ID NO: 17590 - protein, 9 aa, Artificial Sequence
  Description of Artificial Sequence: Synthetic peptide
  XENP018220 vlCDR3
QQDYSSPRT

SEQ ID NO: 17591 - protein, 451 aa, Artificial Sequence
  Description of Artificial Sequence: Synthetic polypeptide
  XENP018221 1G6_H1.120_L1_IgG1_PVA_/S267K Heavy Chain
EVQLVESGGGLVKPGGSLRLSCAASGFTFSNYWMNWVRQAPGKGLEWVGEIRLKSNNHATHYAEPVKGRFTISRDDSKSTVYLQMNSLKTEDTAVYYCTRYYGNYGGYFDVWGAGTLVTVSSASTKGPSVFPLAPSSKSTSGGTAALGCLVKDYFPEPVTVSWNSGALTSGVHTFPAVLQSSGLYSLSSVVTVPSSSLGTQTYICNVNHKPSNTKVDKKVEPKSCDKTHTCPPCPAPPVAGPSVFLFPPKPKDTLMISRTPEVTCVVVDVKHEDPEVKFNWYVDGVEVHNAKTKPREEQYNSTYRVVSVLTVLHQDWLNGKEYKCKVSNKALPAPIEKTISKAKGQPREPQVYTLPPSREEMTKNQVSLTCLVKGFYPSDIAVEWESNGQPENNYKTTPPVLDSDGSFFLYSKLTVDKSRWQQGNVFSCSVMHEALHNHYTQKSLSLSPGK

SEQ ID NO: 17592 - protein, 122 aa, Artificial Sequence; identical to SEQ ID NO: 12107
  Description of Artificial Sequence: Synthetic polypeptide
  VH of XENP018221

SEQ ID NO: 17593 - protein, 5 aa, Artificial Sequence
  Description of Artificial Sequence: Synthetic peptide
  XENP018221 vhCDR1
NYWMN

SEQ ID NO: 17594 - protein, 19 aa, Artificial Sequence
  Description of Artificial Sequence: Synthetic peptide
  XENP018221 vhCDR2
EIRLKSNNHATHYAEPVKG

SEQ ID NO: 17595 - protein, 11 aa, Artificial Sequence
  Description of Artificial Sequence: Synthetic peptide
  XENP018221 vhCDR3
YYGNYGGYFDV

SEQ ID NO: 17596 - protein, 214 aa, Artificial Sequence; identical to SEQ ID NO: 16226
  Description of Artificial Sequence: Synthetic polypeptide
  XENP018221 1G6_H1.120_L1_IgG1_PVA_/S267K Light Chain

SEQ ID NO: 17597 - protein, 107 aa, Artificial Sequence; identical to SEQ ID NO: 10923
  Description of Artificial Sequence: Synthetic polypeptide
  VL of XENP018221

SEQ ID NO: 17598 - protein, 11 aa, Artificial Sequence
  Description of Artificial Sequence: Synthetic peptide
  XENP018221 vlCDR1
RASQSVSNDVA

SEQ ID NO: 17599 - protein, 7 aa, Artificial Sequence
  Description of Artificial Sequence: Synthetic peptide
  XENP018221 vlCDR2
YASHRYT

SEQ ID NO: 17600 - protein, 9 aa, Artificial Sequence
  Description of Artificial Sequence: Synthetic peptide
  XENP018221 vlCDR3
QQDYSSPRT

SEQ ID NO: 17601 - protein, 451 aa, Artificial Sequence
  Description of Artificial Sequence: Synthetic polypeptide
  XENP018222 1G6_H1.121_L1_IgG1_PVA_/S267K Heavy Chain
EVQLVESGGGLVKPGGSLRLSCAASGFTFSNYWMNWVRQAPGKGLEWVGEIRLKSNNLATHYAEPVKGRFTISRDDSKSTVYLQMNSLKTEDTAVYYCTRYYGNYGGYFDVWGAGTLVTVSSASTKGPSVFPLAPSSKSTSGGTAALGCLVKDYFPEPVTVSWNSGALTSGVHTFPAVLQSSGLYSLSSVVTVPSSSLGTQTYICNVNHKPSNTKVDKKVEPKSCDKTHTCPPCPAPPVAGPSVFLFPPKPKDTLMISRTPEVTCVVVDVKHEDPEVKFNWYVDGVEVHNAKTKPREEQYNSTYRVVSVLTVLHQDWLNGKEYKCKVSNKALPAPIEKTISKAKGQPREPQVYTLPPSREEMTKNQVSLTCLVKGFYPSDIAVEWESNGQPENNYKTTPPVLDSDGSFFLYSKLTVDKSRWQQGNVFSCSVMHEALHNHYTQKSLSLSPGK

SEQ ID NO: 17602 - protein, 122 aa, Artificial Sequence; identical to SEQ ID NO: 12116
  Description of Artificial Sequence: Synthetic polypeptide
  VH of XENP018222

SEQ ID NO: 17603 - protein, 5 aa, Artificial Sequence
  Description of Artificial Sequence: Synthetic peptide
  XENP018222 vhCDR1
NYWMN

SEQ ID NO: 17604 - protein, 19 aa, Artificial Sequence
  Description of Artificial Sequence: Synthetic peptide
  XENP018222 vhCDR2
EIRLKSNNLATHYAEPVKG

SEQ ID NO: 17605 - protein, 11 aa, Artificial Sequence
  Description of Artificial Sequence: Synthetic peptide
  XENP018222 vhCDR3
YYGNYGGYFDV

SEQ ID NO: 17606 - protein, 214 aa, Artificial Sequence; identical to SEQ ID NO: 16226
  Description of Artificial Sequence: Synthetic polypeptide
  XENP018222 1G6_H1.121_L1_IgG1_PVA_/S267K Light Chain

SEQ ID NO: 17607 - protein, 107 aa, Artificial Sequence; identical to SEQ ID NO: 10923
  Description of Artificial Sequence: Synthetic polypeptide
  VL of XENP018222

SEQ ID NO: 17608 - protein, 11 aa, Artificial Sequence
  Description of Artificial Sequence: Synthetic peptide
  XENP018222 vlCDR1
RASQSVSNDVA

SEQ ID NO: 17609 - protein, 7 aa, Artificial Sequence
  Description of Artificial Sequence: Synthetic peptide
  XENP018222 vlCDR2
YASHRYT

SEQ ID NO: 17610 - protein, 9 aa, Artificial Sequence
  Description of Artificial Sequence: Synthetic peptide
  XENP018222 vlCDR3
QQDYSSPRT

SEQ ID NO: 17611 - protein, 451 aa, Artificial Sequence
  Description of Artificial Sequence: Synthetic polypeptide
  XENP018223 1G6_H1.122_L1_IgG1_PVA_/S267K Heavy Chain
EVQLVESGGGLVKPGGSLRLSCAASGFTFSNYWMNWVRQAPGKGLEWVGEIRLKSNNWATHYAEPVKGRFTISRDDSKSTVYLQMNSLKTEDTAVYYCTRYYGNYGGYFDVWGAGTLVTVSSASTKGPSVFPLAPSSKSTSGGTAALGCLVKDYFPEPVTVSWNSGALTSGVHTFPAVLQSSGLYSLSSVVTVPSSSLGTQTYICNVNHKPSNTKVDKKVEPKSCDKTHTCPPCPAPPVAGPSVFLFPPKPKDTLMISRTPEVTCVVVDVKHEDPEVKFNWYVDGVEVHNAKTKPREEQYNSTYRVVSVLTVLHQDWLNGKEYKCKVSNKALPAPIEKTISKAKGQPREPQVYTLPPSREEMTKNQVSLTCLVKGFYPSDIAVEWESNGQPENNYKTTPPVLDSDGSFFLYSKLTVDKSRWQQGNVFSCSVMHEALHNHYTQKSLSLSPGK

SEQ ID NO: 17612 - protein, 122 aa, Artificial Sequence; identical to SEQ ID NO: 12125
  Description of Artificial Sequence: Synthetic polypeptide
  VH of XENP018223

SEQ ID NO: 17613 - protein, 5 aa, Artificial Sequence
  Description of Artificial Sequence: Synthetic peptide
  XENP018223 vhCDR1
NYWMN

SEQ ID NO: 17614 - protein, 19 aa, Artificial Sequence
  Description of Artificial Sequence: Synthetic peptide
  XENP018223 vhCDR2
EIRLKSNNWATHYAEPVKG

SEQ ID NO: 17615 - protein, 11 aa, Artificial Sequence
  Description of Artificial Sequence: Synthetic peptide
  XENP018223 vhCDR3
YYGNYGGYFDV

SEQ ID NO: 17616 - protein, 214 aa, Artificial Sequence; identical to SEQ ID NO: 16226
  Description of Artificial Sequence: Synthetic polypeptide
  XENP018223 1G6_H1.122_L1_IgG1_PVA_/S267K Light Chain

SEQ ID NO: 17617 - protein, 107 aa, Artificial Sequence; identical to SEQ ID NO: 10923
  Description of Artificial Sequence: Synthetic polypeptide
  VL of XENP018223

SEQ ID NO: 17618 - protein, 11 aa, Artificial Sequence
  Description of Artificial Sequence: Synthetic peptide
  XENP018223 vlCDR1
RASQSVSNDVA

SEQ ID NO: 17619 - protein, 7 aa, Artificial Sequence
  Description of Artificial Sequence: Synthetic peptide
  XENP018223 vlCDR2
YASHRYT

SEQ ID NO: 17620 - protein, 9 aa, Artificial Sequence
  Description of Artificial Sequence: Synthetic peptide
  XENP018223 vlCDR3
QQDYSSPRT

SEQ ID NO: 17621 - protein, 451 aa, Artificial Sequence
  Description of Artificial Sequence: Synthetic polypeptide
  XENP018224 1G6_H1.123_L1_IgG1_PVA_/S267K Heavy Chain
EVQLVESGGGLVKPGGSLRLSCAASGFTFSNYWMNWVRQAPGKGLEWVGEIRLKSNNVATHYAEPVKGRFTISRDDSKSTVYLQMNSLKTEDTAVYYCTRYYGNYGGYFDVWGAGTLVTVSSASTKGPSVFPLAPSSKSTSGGTAALGCLVKDYFPEPVTVSWNSGALTSGVHTFPAVLQSSGLYSLSSVVTVPSSSLGTQTYICNVNHKPSNTKVDKKVEPKSCDKTHTCPPCPAPPVAGPSVFLFPPKPKDTLMISRTPEVTCVVVDVKHEDPEVKFNWYVDGVEVHNAKTKPREEQYNSTYRVVSVLTVLHQDWLNGKEYKCKVSNKALPAPIEKTISKAKGQPREPQVYTLPPSREEMTKNQVSLTCLVKGFYPSDIAVEWESNGQPENNYKTTPPVLDSDGSFFLYSKLTVDKSRWQQGNVFSCSVMHEALHNHYTQKSLSLSPGK

SEQ ID NO: 17622 - protein, 122 aa, Artificial Sequence; identical to SEQ ID NO: 12134
  Description of Artificial Sequence: Synthetic polypeptide
  VH of XENP018224

SEQ ID NO: 17623 - protein, 5 aa, Artificial Sequence
  Description of Artificial Sequence: Synthetic peptide
  XENP018224 vhCDR1
NYWMN

SEQ ID NO: 17624 - protein, 19 aa, Artificial Sequence
  Description of Artificial Sequence: Synthetic peptide
  XENP018224 vhCDR2
EIRLKSNNVATHYAEPVKG

SEQ ID NO: 17625 - protein, 11 aa, Artificial Sequence
  Description of Artificial Sequence: Synthetic peptide
  XENP018224 vhCDR3
YYGNYGGYFDV

SEQ ID NO: 17626 - protein, 214 aa, Artificial Sequence; identical to SEQ ID NO: 16226
  Description of Artificial Sequence: Synthetic polypeptide
  XENP018224 1G6_H1.123_L1_IgG1_PVA_/S267K Light Chain

SEQ ID NO: 17627 - protein, 107 aa, Artificial Sequence; identical to SEQ ID NO: 10923
  Description of Artificial Sequence: Synthetic polypeptide
  VL of XENP018224

SEQ ID NO: 17628 - protein, 11 aa, Artificial Sequence
  Description of Artificial Sequence: Synthetic peptide
  XENP018224 vlCDR1
RASQSVSNDVA

SEQ ID NO: 17629 - protein, 7 aa, Artificial Sequence
  Description of Artificial Sequence: Synthetic peptide
  XENP018224 vlCDR2
YASHRYT

SEQ ID NO: 17630 - protein, 9 aa, Artificial Sequence
  Description of Artificial Sequence: Synthetic peptide
  XENP018224 vlCDR3
QQDYSSPRT

SEQ ID NO: 17631 - protein, 451 aa, Artificial Sequence
  Description of Artificial Sequence: Synthetic polypeptide
  XENP018225 1G6_H1.124_L1_IgG1_PVA_/S267K Heavy Chain
EVQLVESGGGLVKPGGSLRLSCAASGFTFSNYWMNWVRQAPGKGLEWVGEIRLKSNNAATHYAEPVKGRFTISRDDSKSTVYLQMNSLKTEDTAVYYCTRYYGNYGGYFDVWGAGTLVTVSSASTKGPSVFPLAPSSKSTSGGTAALGCLVKDYFPEPVTVSWNSGALTSGVHTFPAVLQSSGLYSLSSVVTVPSSSLGTQTYICNVNHKPSNTKVDKKVEPKSCDKTHTCPPCPAPPVAGPSVFLFPPKPKDTLMISRTPEVTCVVVDVKHEDPEVKFNWYVDGVEVHNAKTKPREEQYNSTYRVVSVLTVLHQDWLNGKEYKCKVSNKALPAPIEKTISKAKGQPREPQVYTLPPSREEMTKNQVSLTCLVKGFYPSDIAVEWESNGQPENNYKTTPPVLDSDGSFFLYSKLTVDKSRWQQGNVFSCSVMHEALHNHYTQKSLSLSPGK

SEQ ID NO: 17632 - protein, 122 aa, Artificial Sequence; identical to SEQ ID NO: 12143
  Description of Artificial Sequence: Synthetic polypeptide
  VH of XENP018225

SEQ ID NO: 17633 - protein, 5 aa, Artificial Sequence
  Description of Artificial Sequence: Synthetic peptide
  XENP018225 vhCDR1
NYWMN

SEQ ID NO: 17634 - protein, 19 aa, Artificial Sequence
  Description of Artificial Sequence: Synthetic peptide
  XENP018225 vhCDR2
EIRLKSNNAATHYAEPVKG

SEQ ID NO: 17635 - protein, 11 aa, Artificial Sequence
  Description of Artificial Sequence: Synthetic peptide
  XENP018225 vhCDR3
YYGNYGGYFDV

SEQ ID NO: 17636 - protein, 214 aa, Artificial Sequence; identical to SEQ ID NO: 16226
  Description of Artificial Sequence: Synthetic polypeptide
  XENP018225 1G6_H1.124_L1_IgG1_PVA_/S267K Light Chain

SEQ ID NO: 17637 - protein, 107 aa, Artificial Sequence; identical to SEQ ID NO: 10923
  Description of Artificial Sequence: Synthetic polypeptide
  VL of XENP018225

SEQ ID NO: 17638 - protein, 11 aa, Artificial Sequence
  Description of Artificial Sequence: Synthetic peptide
  XENP018225 vlCDR1
RASQSVSNDVA

SEQ ID NO: 17639 - protein, 7 aa, Artificial Sequence
  Description of Artificial Sequence: Synthetic peptide
  XENP018225 vlCDR2
YASHRYT

SEQ ID NO: 17640 - protein, 9 aa, Artificial Sequence
  Description of Artificial Sequence: Synthetic peptide
  XENP018225 vlCDR3
QQDYSSPRT

SEQ ID NO: 17641 - protein, 451 aa, Artificial Sequence
  Description of Artificial Sequence: Synthetic polypeptide
  XENP018226 1G6_H1.125_L1_IgG1_PVA_/S267K Heavy Chain
EVQLVESGGGLVKPGGSLRLSCAASGFTFSNYWMNWVRQAPGKGLEWVGEIRLKSNNQATHYAEPVKGRFTISRDDSKSTVYLQMNSLKTEDTAVYYCTRYYGNYGGYFDVWGAGTLVTVSSASTKGPSVFPLAPSSKSTSGGTAALGCLVKDYFPEPVTVSWNSGALTSGVHTFPAVLQSSGLYSLSSVVTVPSSSLGTQTYICNVNHKPSNTKVDKKVEPKSCDKTHTCPPCPAPPVAGPSVFLFPPKPKDTLMISRTPEVTCVVVDVKHEDPEVKFNWYVDGVEVHNAKTKPREEQYNSTYRVVSVLTVLHQDWLNGKEYKCKVSNKALPAPIEKTISKAKGQPREPQVYTLPPSREEMTKNQVSLTCLVKGFYPSDIAVEWESNGQPENNYKTTPPVLDSDGSFFLYSKLTVDKSRWQQGNVFSCSVMHEALHNHYTQKSLSLSPGK

SEQ ID NO: 17642 - protein, 122 aa, Artificial Sequence; identical to SEQ ID NO: 12152
  Description of Artificial Sequence: Synthetic polypeptide
  VH of XENP018226

SEQ ID NO: 17643 - protein, 5 aa, Artificial Sequence
  Description of Artificial Sequence: Synthetic peptide
  XENP018226 vhCDR1
NYWMN

SEQ ID NO: 17644 - protein, 19 aa, Artificial Sequence
  Description of Artificial Sequence: Synthetic peptide
  XENP018226 vhCDR2
EIRLKSNNQATHYAEPVKG

SEQ ID NO: 17645 - protein, 11 aa, Artificial Sequence
  Description of Artificial Sequence: Synthetic peptide
  XENP018226 vhCDR3
YYGNYGGYFDV

SEQ ID NO: 17646 - protein, 214 aa, Artificial Sequence; identical to SEQ ID NO: 16226
  Description of Artificial Sequence: Synthetic polypeptide
  XENP018226 1G6_H1.125_L1_IgG1_PVA_/S267K Light Chain

SEQ ID NO: 17647 - protein, 107 aa, Artificial Sequence; identical to SEQ ID NO: 10923
  Description of Artificial Sequence: Synthetic polypeptide
  VL of XENP018226

SEQ ID NO: 17648 - protein, 11 aa, Artificial Sequence
  Description of Artificial Sequence: Synthetic peptide
  XENP018226 vlCDR1
RASQSVSNDVA

SEQ ID NO: 17649 - protein, 7 aa, Artificial Sequence
  Description of Artificial Sequence: Synthetic peptide
  XENP018226 vlCDR2
YASHRYT

SEQ ID NO: 17650 - protein, 9 aa, Artificial Sequence
  Description of Artificial Sequence: Synthetic peptide
  XENP018226 vlCDR3
QQDYSSPRT

SEQ ID NO: 17651 - protein, 451 aa, Artificial Sequence
  Description of Artificial Sequence: Synthetic polypeptide
  XENP018227 1G6_H1.126_L1_IgG1_PVA_/S267K Heavy Chain
EVQLVESGGGLVKPGGSLRLSCAASGFTFSNYWMNWVRQAPGKGLEWVGEIRLKSNNDATHYAEPVKGRFTISRDDSKSTVYLQMNSLKTEDTAVYYCTRYYGNYGGYFDVWGAGTLVTVSSASTKGPSVFPLAPSSKSTSGGTAALGCLVKDYFPEPVTVSWNSGALTSGVHTFPAVLQSSGLYSLSSVVTVPSSSLGTQTYICNVNHKPSNTKVDKKVEPKSCDKTHTCPPCPAPPVAGPSVFLFPPKPKDTLMISRTPEVTCVVVDVKHEDPEVKFNWYVDGVEVHNAKTKPREEQYNSTYRVVSVLTVLHQDWLNGKEYKCKVSNKALPAPIEKTISKAKGQPREPQVYTLPPSREEMTKNQVSLTCLVKGFYPSDIAVEWESNGQPENNYKTTPPVLDSDGSFFLYSKLTVDKSRWQQGNVFSCSVMHEALHNHYTQKSLSLSPGK

SEQ ID NO: 17652 - protein, 122 aa, Artificial Sequence; identical to SEQ ID NO: 12161
  Description of Artificial Sequence: Synthetic polypeptide
  VH of XENP018227

SEQ ID NO: 17653 - protein, 5 aa, Artificial Sequence
  Description of Artificial Sequence: Synthetic peptide
  XENP018227 vhCDR1
NYWMN

SEQ ID NO: 17654 - protein, 19 aa, Artificial Sequence
  Description of Artificial Sequence: Synthetic peptide
  XENP018227 vhCDR2
EIRLKSNNDATHYAEPVKG

SEQ ID NO: 17655 - protein, 11 aa, Artificial Sequence
  Description of Artificial Sequence: Synthetic peptide
  XENP018227 vhCDR3
YYGNYGGYFDV

SEQ ID NO: 17656 - protein, 214 aa, Artificial Sequence; identical to SEQ ID NO: 16226
  Description of Artificial Sequence: Synthetic polypeptide
  XENP018227 1G6_H1.126_L1_IgG1_PVA_/S267K Light Chain

SEQ ID NO: 17657 - protein, 107 aa, Artificial Sequence; identical to SEQ ID NO: 10923
  Description of Artificial Sequence: Synthetic polypeptide
  VL of XENP018227

SEQ ID NO: 17658 - protein, 11 aa, Artificial Sequence
  Description of Artificial Sequence: Synthetic peptide
  XENP018227 vlCDR1
RASQSVSNDVA

SEQ ID NO: 17659 - protein, 7 aa, Artificial Sequence
  Description of Artificial Sequence: Synthetic peptide
  XENP018227 vlCDR2
YASHRYT

SEQ ID NO: 17660 - protein, 9 aa, Artificial Sequence
  Description of Artificial Sequence: Synthetic peptide
  XENP018227 vlCDR3
QQDYSSPRT

SEQ ID NO: 17661 - protein, 451 aa, Artificial Sequence
  Description of Artificial Sequence: Synthetic polypeptide
  XENP018228 1G6_H1.127_L1_IgG1_PVA_/S267K Heavy Chain
EVQLVESGGGLVKPGGSLRLSCAASGFTFSNYWMNWVRQAPGKGLEWVGEIRLKSNNKATHYAEPVKGRFTISRDDSKSTVYLQMNSLKTEDTAVYYCTRYYGNYGGYFDVWGAGTLVTVSSASTKGPSVFPLAPSSKSTSGGTAALGCLVKDYFPEPVTVSWNSGALTSGVHTFPAVLQSSGLYSLSSVVTVPSSSLGTQTYICNVNHKPSNTKVDKKVEPKSCDKTHTCPPCPAPPVAGPSVFLFPPKPKDTLMISRTPEVTCVVVDVKHEDPEVKFNWYVDGVEVHNAKTKPREEQYNSTYRVVSVLTVLHQDWLNGKEYKCKVSNKALPAPIEKTISKAKGQPREPQVYTLPPSREEMTKNQVSLTCLVKGFYPSDIAVEWESNGQPENNYKTTPPVLDSDGSFFLYSKLTVDKSRWQQGNVFSCSVMHEALHNHYTQKSLSLSPGK

SEQ ID NO: 17662 - protein, 122 aa, Artificial Sequence; identical to SEQ ID NO: 12170
  Description of Artificial Sequence: Synthetic polypeptide
  VH of XENP018228

SEQ ID NO: 17663 - protein, 5 aa, Artificial Sequence
  Description of Artificial Sequence: Synthetic peptide
  XENP018228 vhCDR1
NYWMN

SEQ ID NO: 17664 - protein, 19 aa, Artificial Sequence
  Description of Artificial Sequence: Synthetic peptide
  XENP018228 vhCDR2
EIRLKSNNKATHYAEPVKG

SEQ ID NO: 17665 - protein, 11 aa, Artificial Sequence
  Description of Artificial Sequence: Synthetic peptide
  XENP018228 vhCDR3
YYGNYGGYFDV

SEQ ID NO: 17666 - protein, 214 aa, Artificial Sequence; identical to SEQ ID NO: 16226
  Description of Artificial Sequence: Synthetic polypeptide
  XENP018228 1G6_H1.127_L1_IgG1_PVA_/S267K Light Chain

SEQ ID NO: 17667 - protein, 107 aa, Artificial Sequence; identical to SEQ ID NO: 10923
  Description of Artificial Sequence: Synthetic polypeptide
  VL of XENP018228

SEQ ID NO: 17668 - protein, 11 aa, Artificial Sequence
  Description of Artificial Sequence: Synthetic peptide
  XENP018228 vlCDR1
RASQSVSNDVA

SEQ ID NO: 17669 - protein, 7 aa, Artificial Sequence
  Description of Artificial Sequence: Synthetic peptide
  XENP018228 vlCDR2
YASHRYT

SEQ ID NO: 17670 - protein, 9 aa, Artificial Sequence
  Description of Artificial Sequence: Synthetic peptide
  XENP018228 vlCDR3
QQDYSSPRT

SEQ ID NO: 17671 - protein, 451 aa, Artificial Sequence
  Description of Artificial Sequence: Synthetic polypeptide
  XENP018229 1G6_H1.128_L1_IgG1_PVA_/S267K Heavy Chain
EVQLVESGGGLVKPGGSLRLSCAASGFTFSNYWMNWVRQAPGKGLEWVGEIRLKSNNYGTHYAEPVKGRFTISRDDSKSTVYLQMNSLKTEDTAVYYCTRYYGNYGGYFDVWGAGTLVTVSSASTKGPSVFPLAPSSKSTSGGTAALGCLVKDYFPEPVTVSWNSGALTSGVHTFPAVLQSSGLYSLSSVVTVPSSSLGTQTYICNVNHKPSNTKVDKKVEPKSCDKTHTCPPCPAPPVAGPSVFLFPPKPKDTLMISRTPEVTCVVVDVKHEDPEVKFNWYVDGVEVHNAKTKPREEQYNSTYRVVSVLTVLHQDWLNGKEYKCKVSNKALPAPIEKTISKAKGQPREPQVYTLPPSREEMTKNQVSLTCLVKGFYPSDIAVEWESNGQPENNYKTTPPVLDSDGSFFLYSKLTVDKSRWQQGNVFSCSVMHEALHNHYTQKSLSLSPGK

SEQ ID NO: 17672 - protein, 122 aa, Artificial Sequence; identical to SEQ ID NO: 12179
  Description of Artificial Sequence: Synthetic polypeptide
  VH of XENP018229

SEQ ID NO: 17673 - protein, 5 aa, Artificial Sequence
  Description of Artificial Sequence: Synthetic peptide
  XENP018229 vhCDR1
NYWMN

SEQ ID NO: 17674 - protein, 19 aa, Artificial Sequence
  Description of Artificial Sequence: Synthetic peptide
  XENP018229 vhCDR2
EIRLKSNNYGTHYAEPVKG

SEQ ID NO: 17675 - protein, 11 aa, Artificial Sequence
  Description of Artificial Sequence: Synthetic peptide
  XENP018229 vhCDR3
YYGNYGGYFDV

SEQ ID NO: 17676 - protein, 214 aa, Artificial Sequence; identical to SEQ ID NO: 16226
  Description of Artificial Sequence: Synthetic polypeptide
  XENP018229 1G6_H1.128_L1_IgG1_PVA_/S267K Light Chain

SEQ ID NO: 17677 - protein, 107 aa, Artificial Sequence; identical to SEQ ID NO: 10923
  Description of Artificial Sequence: Synthetic polypeptide
  VL of XENP018229

SEQ ID NO: 17678 - protein, 11 aa, Artificial Sequence
  Description of Artificial Sequence: Synthetic peptide
  XENP018229 vlCDR1
RASQSVSNDVA

SEQ ID NO: 17679 - protein, 7 aa, Artificial Sequence
  Description of Artificial Sequence: Synthetic peptide
  XENP018229 vlCDR2
YASHRYT

SEQ ID NO: 17680 - protein, 9 aa, Artificial Sequence
  Description of Artificial Sequence: Synthetic peptide
  XENP018229 vlCDR3
QQDYSSPRT

SEQ ID NO: 17681 - protein, 451 aa, Artificial Sequence
  Description of Artificial Sequence: Synthetic polypeptide
  XENP018230 1G6_H1.129_L1_IgG1_PVA_/S267K Heavy Chain
EVQLVESGGGLVKPGGSLRLSCAASGFTFSNYWMNWVRQAPGKGLEWVGEIRLKSNNYHTHYAEPVKGRFTISRDDSKSTVYLQMNSLKTEDTAVYYCTRYYGNYGGYFDVWGAGTLVTVSSASTKGPSVFPLAPSSKSTSGGTAALGCLVKDYFPEPVTVSWNSGALTSGVHTFPAVLQSSGLYSLSSVVTVPSSSLGTQTYICNVNHKPSNTKVDKKVEPKSCDKTHTCPPCPAPPVAGPSVFLFPPKPKDTLMISRTPEVTCVVVDVKHEDPEVKFNWYVDGVEVHNAKTKPREEQYNSTYRVVSVLTVLHQDWLNGKEYKCKVSNKALPAPIEKTISKAKGQPREPQVYTLPPSREEMTKNQVSLTCLVKGFYPSDIAVEWESNGQPENNYKTTPPVLDSDGSFFLYSKLTVDKSRWQQGNVFSCSVMHEALHNHYTQKSLSLSPGK

SEQ ID NO: 17682 - protein, 122 aa, Artificial Sequence; identical to SEQ ID NO: 12188
  Description of Artificial Sequence: Synthetic polypeptide
  VH of XENP018230

SEQ ID NO: 17683 - protein, 5 aa, Artificial Sequence
  Description of Artificial Sequence: Synthetic peptide
  XENP018230 vhCDR1
NYWMN

SEQ ID NO: 17684 - protein, 19 aa, Artificial Sequence
  Description of Artificial Sequence: Synthetic peptide
  XENP018230 vhCDR2
EIRLKSNNYHTHYAEPVKG

SEQ ID NO: 17685 - protein, 11 aa, Artificial Sequence
  Description of Artificial Sequence: Synthetic peptide
  XENP018230 vhCDR3
YYGNYGGYFDV

SEQ ID NO: 17686 - protein, 214 aa, Artificial Sequence; identical to SEQ ID NO: 16226
  Description of Artificial Sequence: Synthetic polypeptide
  XENP018230 1G6_H1.129_L1_IgG1_PVA_/S267K Light Chain

SEQ ID NO: 17687 - protein, 107 aa, Artificial Sequence; identical to SEQ ID NO: 10923
  Description of Artificial Sequence: Synthetic polypeptide
  VL of XENP018230

SEQ ID NO: 17688 - protein, 11 aa, Artificial Sequence
  Description of Artificial Sequence: Synthetic peptide
  XENP018230 vlCDR1
RASQSVSNDVA

SEQ ID NO: 17689 - protein, 7 aa, Artificial Sequence
  Description of Artificial Sequence: Synthetic peptide
  XENP018230 vlCDR2
YASHRYT

SEQ ID NO: 17690 - protein, 9 aa, Artificial Sequence
  Description of Artificial Sequence: Synthetic peptide
  XENP018230 vlCDR3
QQDYSSPRT

SEQ ID NO: 17691 - protein, 451 aa, Artificial Sequence
  Description of Artificial Sequence: Synthetic polypeptide
  XENP018231 1G6_H1.130_L1_IgG1_PVA_/S267K Heavy Chain
EVQLVESGGGLVKPGGSLRLSCAASGFTFSNYWMNWVRQAPGKGLEWVGEIRLKSNNYQTHYAEPVKGRFTISRDDSKSTVYLQMNSLKTEDTAVYYCTRYYGNYGGYFDVWGAGTLVTVSSASTKGPSVFPLAPSSKSTSGGTAALGCLVKDYFPEPVTVSWNSGALTSGVHTFPAVLQSSGLYSLSSVVTVPSSSLGTQTYICNVNHKPSNTKVDKKVEPKSCDKTHTCPPCPAPPVAGPSVFLFPPKPKDTLMISRTPEVTCVVVDVKHEDPEVKFNWYVDGVEVHNAKTKPREEQYNSTYRVVSVLTVLHQDWLNGKEYKCKVSNKALPAPIEKTISKAKGQPREPQVYTLPPSREEMTKNQVSLTCLVKGFYPSDIAVEWESNGQPENNYKTTPPVLDSDGSFFLYSKLTVDKSRWQQGNVFSCSVMHEALHNHYTQKSLSLSPGK

SEQ ID NO: 17692 - protein, 122 aa, Artificial Sequence; identical to SEQ ID NO: 12197
  Description of Artificial Sequence: Synthetic polypeptide
  VH of XENP018231

SEQ ID NO: 17693 - protein, 5 aa, Artificial Sequence
  Description of Artificial Sequence: Synthetic peptide
  XENP018231 vhCDR1
NYWMN

SEQ ID NO: 17694 - protein, 19 aa, Artificial Sequence
  Description of Artificial Sequence: Synthetic peptide
  XENP018231 vhCDR2
EIRLKSNNYQTHYAEPVKG

SEQ ID NO: 17695 - protein, 11 aa, Artificial Sequence
  Description of Artificial Sequence: Synthetic peptide
  XENP018231 vhCDR3
YYGNYGGYFDV

SEQ ID NO: 17696 - protein, 214 aa, Artificial Sequence; identical to SEQ ID NO: 16226
  Description of Artificial Sequence: Synthetic polypeptide
  XENP018231 1G6_H1.130_L1_IgG1_PVA_/S267K Light Chain

SEQ ID NO: 17697 - protein, 107 aa, Artificial Sequence; identical to SEQ ID NO: 10923
  Description of Artificial Sequence: Synthetic polypeptide
  VL of XENP018231

SEQ ID NO: 17698 - protein, 11 aa, Artificial Sequence
  Description of Artificial Sequence: Synthetic peptide
  XENP018231 vlCDR1
RASQSVSNDVA

SEQ ID NO: 17699 - protein, 7 aa, Artificial Sequence
  Description of Artificial Sequence: Synthetic peptide
  XENP018231 vlCDR2
YASHRYT

SEQ ID NO: 17700 - protein, 9 aa, Artificial Sequence
  Description of Artificial Sequence: Synthetic peptide
  XENP018231 vlCDR3
QQDYSSPRT

SEQ ID NO: 17701 - protein, 451 aa, Artificial Sequence
  Description of Artificial Sequence: Synthetic polypeptide
  XENP018232 1G6_H1.131_L1_IgG1_PVA_/S267K Heavy Chain
EVQLVESGGGLVKPGGSLRLSCAASGFTFSNYWMNWVRQAPGKGLEWVGEIRLKSNNYDTHYAEPVKGRFTISRDDSKSTVYLQMNSLKTEDTAVYYCTRYYGNYGGYFDVWGAGTLVTVSSASTKGPSVFPLAPSSKSTSGGTAALGCLVKDYFPEPVTVSWNSGALTSGVHTFPAVLQSSGLYSLSSVVTVPSSSLGTQTYICNVNHKPSNTKVDKKVEPKSCDKTHTCPPCPAPPVAGPSVFLFPPKPKDTLMISRTPEVTCVVVDVKHEDPEVKFNWYVDGVEVHNAKTKPREEQYNSTYRVVSVLTVLHQDWLNGKEYKCKVSNKALPAPIEKTISKAKGQPREPQVYTLPPSREEMTKNQVSLTCLVKGFYPSDIAVEWESNGQPENNYKTTPPVLDSDGSFFLYSKLTVDKSRWQQGNVFSCSVMHEALHNHYTQKSLSLSPGK

SEQ ID NO: 17702 - protein, 122 aa, Artificial Sequence; identical to SEQ ID NO: 12206
  Description of Artificial Sequence: Synthetic polypeptide
  VH of XENP018232

SEQ ID NO: 17703 - protein, 5 aa, Artificial Sequence
  Description of Artificial Sequence: Synthetic peptide
  XENP018232 vhCDR1
NYWMN

SEQ ID NO: 17704 - protein, 19 aa, Artificial Sequence
  Description of Artificial Sequence: Synthetic peptide
  XENP018232 vhCDR2
EIRLKSNNYDTHYAEPVKG

SEQ ID NO: 17705 - protein, 11 aa, Artificial Sequence
  Description of Artificial Sequence: Synthetic peptide
  XENP018232 vhCDR3
YYGNYGGYFDV

SEQ ID NO: 17706 - protein, 214 aa, Artificial Sequence; identical to SEQ ID NO: 16226
  Description of Artificial Sequence: Synthetic polypeptide
  XENP018232 1G6_H1.131_L1_IgG1_PVA_/S267K Light Chain

SEQ ID NO: 17707 - protein, 107 aa, Artificial Sequence; identical to SEQ ID NO: 10923
  Description of Artificial Sequence: Synthetic polypeptide
  VL of XENP018232

SEQ ID NO: 17708 - protein, 11 aa, Artificial Sequence
  Description of Artificial Sequence: Synthetic peptide
  XENP018232 vlCDR1
RASQSVSNDVA

SEQ ID NO: 17709 - protein, 7 aa, Artificial Sequence
  Description of Artificial Sequence: Synthetic peptide
  XENP018232 vlCDR2
YASHRYT

SEQ ID NO: 17710 - protein, 9 aa, Artificial Sequence
  Description of Artificial Sequence: Synthetic peptide
  XENP018232 vlCDR3
QQDYSSPRT

SEQ ID NO: 17711 - protein, 451 aa, Artificial Sequence
  Description of Artificial Sequence: Synthetic polypeptide
  XENP018233 1G6_H1.132_L1_IgG1_PVA_/S267K Heavy Chain
EVQLVESGGGLVKPGGSLRLSCAASGFTFSNYWMNWVRQAPGKGLEWVGEIRLKSNNYLTHYAEPVKGRFTISRDDSKSTVYLQMNSLKTEDTAVYYCTRYYGNYGGYFDVWGAGTLVTVSSASTKGPSVFPLAPSSKSTSGGTAALGCLVKDYFPEPVTVSWNSGALTSGVHTFPAVLQSSGLYSLSSVVTVPSSSLGTQTYICNVNHKPSNTKVDKKVEPKSCDKTHTCPPCPAPPVAGPSVFLFPPKPKDTLMISRTPEVTCVVVDVKHEDPEVKFNWYVDGVEVHNAKTKPREEQYNSTYRVVSVLTVLHQDWLNGKEYKCKVSNKALPAPIEKTISKAKGQPREPQVYTLPPSREEMTKNQVSLTCLVKGFYPSDIAVEWESNGQPENNYKTTPPVLDSDGSFFLYSKLTVDKSRWQQGNVFSCSVMHEALHNHYTQKSLSLSPGK

SEQ ID NO: 17712 - protein, 122 aa, Artificial Sequence; identical to SEQ ID NO: 12215
  Description of Artificial Sequence: Synthetic polypeptide
  VH of XENP018233

SEQ ID NO: 17713 - protein, 5 aa, Artificial Sequence
  Description of Artificial Sequence: Synthetic peptide
  XENP018233 vhCDR1
NYWMN

SEQ ID NO: 17714 - protein, 19 aa, Artificial Sequence
  Description of Artificial Sequence: Synthetic peptide
  XENP018233 vhCDR2
EIRLKSNNYLTHYAEPVKG

SEQ ID NO: 17715 - protein, 11 aa, Artificial Sequence
  Description of Artificial Sequence: Synthetic peptide
  XENP018233 vhCDR3
YYGNYGGYFDV

SEQ ID NO: 17716 - protein, 214 aa, Artificial Sequence; identical to SEQ ID NO: 16226
  Description of Artificial Sequence: Synthetic polypeptide
  XENP018233 1G6_H1.132_L1_IgG1_PVA_/S267K Light Chain

SEQ ID NO: 17717 - protein, 107 aa, Artificial Sequence; identical to SEQ ID NO: 10923
  Description of Artificial Sequence: Synthetic polypeptide
  VL of XENP018233

SEQ ID NO: 17718 - protein, 11 aa, Artificial Sequence
  Description of Artificial Sequence: Synthetic peptide
  XENP018233 vlCDR1
RASQSVSNDVA

SEQ ID NO: 17719 - protein, 7 aa, Artificial Sequence
  Description of Artificial Sequence: Synthetic peptide
  XENP018233 vlCDR2
YASHRYT

SEQ ID NO: 17720 - protein, 9 aa, Artificial Sequence
  Description of Artificial Sequence: Synthetic peptide
  XENP018233 vlCDR3
QQDYSSPRT

SEQ ID NO: 17721 - protein, 451 aa, Artificial Sequence
  Description of Artificial Sequence: Synthetic polypeptide
  XENP018234 1G6_H1.133_L1_IgG1_PVA_/S267K Heavy Chain
EVQLVESGGGLVKPGGSLRLSCAASGFTFSNYWMNWVRQAPGKGLEWVGEIRLKSNNYKTHYAEPVKGRFTISRDDSKSTVYLQMNSLKTEDTAVYYCTRYYGNYGGYFDVWGAGTLVTVSSASTKGPSVFPLAPSSKSTSGGTAALGCLVKDYFPEPVTVSWNSGALTSGVHTFPAVLQSSGLYSLSSVVTVPSSSLGTQTYICNVNHKPSNTKVDKKVEPKSCDKTHTCPPCPAPPVAGPSVFLFPPKPKDTLMISRTPEVTCVVVDVKHEDPEVKFNWYVDGVEVHNAKTKPREEQYNSTYRVVSVLTVLHQDWLNGKEYKCKVSNKALPAPIEKTISKAKGQPREPQVYTLPPSREEMTKNQVSLTCLVKGFYPSDIAVEWESNGQPENNYKTTPPVLDSDGSFFLYSKLTVDKSRWQQGNVFSCSVMHEALHNHYTQKSLSLSPGK

SEQ ID NO: 17722 - protein, 122 aa, Artificial Sequence; identical to SEQ ID NO: 12224
  Description of Artificial Sequence: Synthetic polypeptide
  VH of XENP018234

SEQ ID NO: 17723 - protein, 5 aa, Artificial Sequence
  Description of Artificial Sequence: Synthetic peptide
  XENP018234 vhCDR1
NYWMN

SEQ ID NO: 17724 - protein, 19 aa, Artificial Sequence
  Description of Artificial Sequence: Synthetic peptide
  XENP018234 vhCDR2
EIRLKSNNYKTHYAEPVKG

SEQ ID NO: 17725 - protein, 11 aa, Artificial Sequence
  Description of Artificial Sequence: Synthetic peptide
  XENP018234 vhCDR3
YYGNYGGYFDV

SEQ ID NO: 17726 - protein, 214 aa, Artificial Sequence; identical to SEQ ID NO: 16226
  Description of Artificial Sequence: Synthetic polypeptide
  XENP018234 1G6_H1.133_L1_IgG1_PVA_/S267K Light Chain

SEQ ID NO: 17727 - protein, 107 aa, Artificial Sequence; identical to SEQ ID NO: 10923
  Description of Artificial Sequence: Synthetic polypeptide
  VL of XENP018234

SEQ ID NO: 17728 - protein, 11 aa, Artificial Sequence
  Description of Artificial Sequence: Synthetic peptide
  XENP018234 vlCDR1
RASQSVSNDVA

SEQ ID NO: 17729 - protein, 7 aa, Artificial Sequence
  Description of Artificial Sequence: Synthetic peptide
  XENP018234 vlCDR2
YASHRYT

SEQ ID NO: 17730 - protein, 9 aa, Artificial Sequence
  Description of Artificial Sequence: Synthetic peptide
  XENP018234 vlCDR3
QQDYSSPRT

SEQ ID NO: 17731 - protein, 451 aa, Artificial Sequence
  Description of Artificial Sequence: Synthetic polypeptide
  XENP018235 1G6_H1.134_L1_IgG1_PVA_/S267K Heavy Chain
EVQLVESGGGLVKPGGSLRLSCAASGFTFSNYWMNWVRQAPGKGLEWVGEIRLKSNNYYTHYAEPVKGRFTISRDDSKSTVYLQMNSLKTEDTAVYYCTRYYGNYGGYFDVWGAGTLVTVSSASTKGPSVFPLAPSSKSTSGGTAALGCLVKDYFPEPVTVSWNSGALTSGVHTFPAVLQSSGLYSLSSVVTVPSSSLGTQTYICNVNHKPSNTKVDKKVEPKSCDKTHTCPPCPAPPVAGPSVFLFPPKPKDTLMISRTPEVTCVVVDVKHEDPEVKFNWYVDGVEVHNAKTKPREEQYNSTYRVVSVLTVLHQDWLNGKEYKCKVSNKALPAPIEKTISKAKGQPREPQVYTLPPSREEMTKNQVSLTCLVKGFYPSDIAVEWESNGQPENNYKTTPPVLDSDGSFFLYSKLTVDKSRWQQGNVFSCSVMHEALHNHYTQKSLSLSPGK

SEQ ID NO: 17732 - protein, 122 aa, Artificial Sequence; identical to SEQ ID NO: 12233
  Description of Artificial Sequence: Synthetic polypeptide
  VH of XENP018235

SEQ ID NO: 17733 - protein, 5 aa, Artificial Sequence
  Description of Artificial Sequence: Synthetic peptide
  XENP018235 vhCDR1
NYWMN

SEQ ID NO: 17734 - protein, 19 aa, Artificial Sequence
  Description of Artificial Sequence: Synthetic peptide
  XENP018235 vhCDR2
EIRLKSNNYYTHYAEPVKG

SEQ ID NO: 17735 - protein, 11 aa, Artificial Sequence
  Description of Artificial Sequence: Synthetic peptide
  XENP018235 vhCDR3
YYGNYGGYFDV

SEQ ID NO: 17736 - protein, 214 aa, Artificial Sequence; identical to SEQ ID NO: 16226
  Description of Artificial Sequence: Synthetic polypeptide
  XENP018235 1G6_H1.134_L1_IgG1_PVA_/S267K Light Chain

SEQ ID NO: 17737 - protein, 107 aa, Artificial Sequence; identical to SEQ ID NO: 10923
  Description of Artificial Sequence: Synthetic polypeptide
  VL of XENP018235

SEQ ID NO: 17738 - protein, 11 aa, Artificial Sequence
  Description of Artificial Sequence: Synthetic peptide
  XENP018235 vlCDR1
RASQSVSNDVA

SEQ ID NO: 17739 - protein, 7 aa, Artificial Sequence
  Description of Artificial Sequence: Synthetic peptide
  XENP018235 vlCDR2
YASHRYT

SEQ ID NO: 17740 - protein, 9 aa, Artificial Sequence
  Description of Artificial Sequence: Synthetic peptide
  XENP018235 vlCDR3
QQDYSSPRT

SEQ ID NO: 17741 - protein, 451 aa, Artificial Sequence
  Description of Artificial Sequence: Synthetic polypeptide
  XENP018236 1G6_H1.135_L1_IgG1_PVA_/S267K Heavy Chain
EVQLVESGGGLVKPGGSLRLSCAASGFTFSNYWMNWVRQAPGKGLEWVGEIRLKSNNYAKHYAEPVKGRFTISRDDSKSTVYLQMNSLKTEDTAVYYCTRYYGNYGGYFDVWGAGTLVTVSSASTKGPSVFPLAPSSKSTSGGTAALGCLVKDYFPEPVTVSWNSGALTSGVHTFPAVLQSSGLYSLSSVVTVPSSSLGTQTYICNVNHKPSNTKVDKKVEPKSCDKTHTCPPCPAPPVAGPSVFLFPPKPKDTLMISRTPEVTCVVVDVKHEDPEVKFNWYVDGVEVHNAKTKPREEQYNSTYRVVSVLTVLHQDWLNGKEYKCKVSNKALPAPIEKTISKAKGQPREPQVYTLPPSREEMTKNQVSLTCLVKGFYPSDIAVEWESNGQPENNYKTTPPVLDSDGSFFLYSKLTVDKSRWQQGNVFSCSVMHEALHNHYTQKSLSLSPGK

SEQ ID NO: 17742 - protein, 122 aa, Artificial Sequence; identical to SEQ ID NO: 12242
  Description of Artificial Sequence: Synthetic polypeptide
  VH of XENP018236

SEQ ID NO: 17743 - protein, 5 aa, Artificial Sequence
  Description of Artificial Sequence: Synthetic peptide
  XENP018236 vhCDR1
NYWMN

SEQ ID NO: 17744 - protein, 19 aa, Artificial Sequence
  Description of Artificial Sequence: Synthetic peptide
  XENP018236 vhCDR2
EIRLKSNNYAKHYAEPVKG

SEQ ID NO: 17745 - protein, 11 aa, Artificial Sequence
  Description of Artificial Sequence: Synthetic peptide
  XENP018236 vhCDR3
YYGNYGGYFDV

SEQ ID NO: 17746 - protein, 214 aa, Artificial Sequence; identical to SEQ ID NO: 16226
  Description of Artificial Sequence: Synthetic polypeptide
  XENP018236 1G6_H1.135_L1_IgG1_PVA_/S267K Light Chain

SEQ ID NO: 17747 - protein, 107 aa, Artificial Sequence; identical to SEQ ID NO: 10923
  Description of Artificial Sequence: Synthetic polypeptide
  VL of XENP018236

SEQ ID NO: 17748 - protein, 11 aa, Artificial Sequence
  Description of Artificial Sequence: Synthetic peptide
  XENP018236 vlCDR1
RASQSVSNDVA

SEQ ID NO: 17749 - protein, 7 aa, Artificial Sequence
  Description of Artificial Sequence: Synthetic peptide
  XENP018236 vlCDR2
YASHRYT

SEQ ID NO: 17750 - protein, 9 aa, Artificial Sequence
  Description of Artificial Sequence: Synthetic peptide
  XENP018236 vlCDR3
QQDYSSPRT

SEQ ID NO: 17751 - protein, 451 aa, Artificial Sequence
  Description of Artificial Sequence: Synthetic polypeptide
  XENP018237 1G6_H1.136_L1_IgG1_PVA_/S267K Heavy Chain
EVQLVESGGGLVKPGGSLRLSCAASGFTFSNYWMNWVRQAPGKGLEWVGEIRLKSNNYAIHYAEPVKGRFTISRDDSKSTVYLQMNSLKTEDTAVYYCTRYYGNYGGYFDVWGAGTLVTVSSASTKGPSVFPLAPSSKSTSGGTAALGCLVKDYFPEPVTVSWNSGALTSGVHTFPAVLQSSGLYSLSSVVTVPSSSLGTQTYICNVNHKPSNTKVDKKVEPKSCDKTHTCPPCPAPPVAGPSVFLFPPKPKDTLMISRTPEVTCVVVDVKHEDPEVKFNWYVDGVEVHNAKTKPREEQYNSTYRVVSVLTVLHQDWLNGKEYKCKVSNKALPAPIEKTISKAKGQPREPQVYTLPPSREEMTKNQVSLTCLVKGFYPSDIAVEWESNGQPENNYKTTPPVLDSDGSFFLYSKLTVDKSRWQQGNVFSCSVMHEALHNHYTQKSLSLSPGK

SEQ ID NO: 17752 - protein, 122 aa, Artificial Sequence; identical to SEQ ID NO: 12251
  Description of Artificial Sequence: Synthetic polypeptide
  VH of XENP018237

SEQ ID NO: 17753 - protein, 5 aa, Artificial Sequence
  Description of Artificial Sequence: Synthetic peptide
  XENP018237 vhCDR1
NYWMN

SEQ ID NO: 17754 - protein, 19 aa, Artificial Sequence
  Description of Artificial Sequence: Synthetic peptide
  XENP018237 vhCDR2
EIRLKSNNYAIHYAEPVKG

SEQ ID NO: 17755 - protein, 11 aa, Artificial Sequence
  Description of Artificial Sequence: Synthetic peptide
  XENP018237 vhCDR3
YYGNYGGYFDV

SEQ ID NO: 17756 - protein, 214 aa, Artificial Sequence; identical to SEQ ID NO: 16226
  Description of Artificial Sequence: Synthetic polypeptide
  XENP018237 1G6_H1.136_L1_IgG1_PVA_/S267K Light Chain

SEQ ID NO: 17757 - protein, 107 aa, Artificial Sequence; identical to SEQ ID NO: 10923
  Description of Artificial Sequence: Synthetic polypeptide
  VL of XENP018237

SEQ ID NO: 17758 - protein, 11 aa, Artificial Sequence
  Description of Artificial Sequence: Synthetic peptide
  XENP018237 vlCDR1
RASQSVSNDVA

SEQ ID NO: 17759 - protein, 7 aa, Artificial Sequence
  Description of Artificial Sequence: Synthetic peptide
  XENP018237 vlCDR2
YASHRYT

SEQ ID NO: 17760 - protein, 9 aa, Artificial Sequence
  Description of Artificial Sequence: Synthetic peptide
  XENP018237 vlCDR3
QQDYSSPRT

SEQ ID NO: 17761 - protein, 451 aa, Artificial Sequence
  Description of Artificial Sequence: Synthetic polypeptide
  XENP018238 1G6_H1.137_L1_IgG1_PVA_/S267K Heavy Chain
EVQLVESGGGLVKPGGSLRLSCAASGFTFSNYWMNWVRQAPGKGLEWVGEIRLKSNNYATYYAEPVKGRFTISRDDSKSTVYLQMNSLKTEDTAVYYCTRYYGNYGGYFDVWGAGTLVTVSSASTKGPSVFPLAPSSKSTSGGTAALGCLVKDYFPEPVTVSWNSGALTSGVHTFPAVLQSSGLYSLSSVVTVPSSSLGTQTYICNVNHKPSNTKVDKKVEPKSCDKTHTCPPCPAPPVAGPSVFLFPPKPKDTLMISRTPEVTCVVVDVKHEDPEVKFNWYVDGVEVHNAKTKPREEQYNSTYRVVSVLTVLHQDWLNGKEYKCKVSNKALPAPIEKTISKAKGQPREPQVYTLPPSREEMTKNQVSLTCLVKGFYPSDIAVEWESNGQPENNYKTTPPVLDSDGSFFLYSKLTVDKSRWQQGNVFSCSVMHEALHNHYTQKSLSLSPGK

SEQ ID NO: 17762 - protein, 122 aa, Artificial Sequence; identical to SEQ ID NO: 12260
  Description of Artificial Sequence: Synthetic polypeptide
  VH of XENP018238

SEQ ID NO: 17763 - protein, 5 aa, Artificial Sequence
  Description of Artificial Sequence: Synthetic peptide
  XENP018238 vhCDR1
NYWMN

SEQ ID NO: 17764 - protein, 19 aa, Artificial Sequence
  Description of Artificial Sequence: Synthetic peptide
  XENP018238 vhCDR2
EIRLKSNNYATYYAEPVKG

SEQ ID NO: 17765 - protein, 11 aa, Artificial Sequence
  Description of Artificial Sequence: Synthetic peptide
  XENP018238 vhCDR3
YYGNYGGYFDV

SEQ ID NO: 17766 - protein, 214 aa, Artificial Sequence; identical to SEQ ID NO: 16226
  Description of Artificial Sequence: Synthetic polypeptide
  XENP018238 1G6_H1.137_L1_IgG1_PVA_/S267K Light Chain

SEQ ID NO: 17767 - protein, 107 aa, Artificial Sequence; identical to SEQ ID NO: 10923
  Description of Artificial Sequence: Synthetic polypeptide
  VL of XENP018238

SEQ ID NO: 17768 - protein, 11 aa, Artificial Sequence
  Description of Artificial Sequence: Synthetic peptide
  XENP018238 vlCDR1
RASQSVSNDVA

SEQ ID NO: 17769 - protein, 7 aa, Artificial Sequence
  Description of Artificial Sequence: Synthetic peptide
  XENP018238 vlCDR2
YASHRYT

SEQ ID NO: 17770 - protein, 9 aa, Artificial Sequence
  Description of Artificial Sequence: Synthetic peptide
  XENP018238 vlCDR3
QQDYSSPRT

SEQ ID NO: 17771 - protein, 451 aa, Artificial Sequence
  Description of Artificial Sequence: Synthetic polypeptide
  XENP018239 1G6_H1.138_L1_IgG1_PVA_/S267K Heavy Chain
EVQLVESGGGLVKPGGSLRLSCAASGFTFSNYWMNWVRQAPGKGLEWVGEIRLKSNNYATQYAEPVKGRFTISRDDSKSTVYLQMNSLKTEDTAVYYCTRYYGNYGGYFDVWGAGTLVTVSSASTKGPSVFPLAPSSKSTSGGTAALGCLVKDYFPEPVTVSWNSGALTSGVHTFPAVLQSSGLYSLSSVVTVPSSSLGTQTYICNVNHKPSNTKVDKKVEPKSCDKTHTCPPCPAPPVAGPSVFLFPPKPKDTLMISRTPEVTCVVVDVKHEDPEVKFNWYVDGVEVHNAKTKPREEQYNSTYRVVSVLTVLHQDWLNGKEYKCKVSNKALPAPIEKTISKAKGQPREPQVYTLPPSREEMTKNQVSLTCLVKGFYPSDIAVEWESNGQPENNYKTTPPVLDSDGSFFLYSKLTVDKSRWQQGNVFSCSVMHEALHNHYTQKSLSLSPGK

SEQ ID NO: 17772 - protein, 122 aa, Artificial Sequence; identical to SEQ ID NO: 12269
  Description of Artificial Sequence: Synthetic polypeptide
  VH of XENP018239

SEQ ID NO: 17773 - protein, 5 aa, Artificial Sequence
  Description of Artificial Sequence: Synthetic peptide
  XENP018239 vhCDR1
NYWMN

SEQ ID NO: 17774 - protein, 19 aa, Artificial Sequence
  Description of Artificial Sequence: Synthetic peptide
  XENP018239 vhCDR2
EIRLKSNNYATQYAEPVKG

SEQ ID NO: 17775 - protein, 11 aa, Artificial Sequence
  Description of Artificial Sequence: Synthetic peptide
  XENP018239 vhCDR3
YYGNYGGYFDV

SEQ ID NO: 17776 - protein, 214 aa, Artificial Sequence; identical to SEQ ID NO: 16226
  Description of Artificial Sequence: Synthetic polypeptide
  XENP018239 1G6_H1.138_L1_IgG1_PVA_/S267K Light Chain

SEQ ID NO: 17777 - protein, 107 aa, Artificial Sequence; identical to SEQ ID NO: 10923
  Description of Artificial Sequence: Synthetic polypeptide
  VL of XENP018239

SEQ ID NO: 17778 - protein, 11 aa, Artificial Sequence
  Description of Artificial Sequence: Synthetic peptide
  XENP018239 vlCDR1
RASQSVSNDVA

SEQ ID NO: 17779 - protein, 7 aa, Artificial Sequence
  Description of Artificial Sequence: Synthetic peptide
  XENP018239 vlCDR2
YASHRYT

SEQ ID NO: 17780 - protein, 9 aa, Artificial Sequence
  Description of Artificial Sequence: Synthetic peptide
  XENP018239 vlCDR3
QQDYSSPRT

SEQ ID NO: 17781 - protein, 451 aa, Artificial Sequence
  Description of Artificial Sequence: Synthetic polypeptide
  XENP018240 1G6_H1.139_L1_IgG1_PVA_/S267K Heavy Chain
EVQLVESGGGLVKPGGSLRLSCAASGFTFSNYWMNWVRQAPGKGLEWVGEIRLKSNNYATDYAEPVKGRFTISRDDSKSTVYLQMNSLKTEDTAVYYCTRYYGNYGGYFDVWGAGTLVTVSSASTKGPSVFPLAPSSKSTSGGTAALGCLVKDYFPEPVTVSWNSGALTSGVHTFPAVLQSSGLYSLSSVVTVPSSSLGTQTYICNVNHKPSNTKVDKKVEPKSCDKTHTCPPCPAPPVAGPSVFLFPPKPKDTLMISRTPEVTCVVVDVKHEDPEVKFNWYVDGVEVHNAKTKPREEQYNSTYRVVSVLTVLHQDWLNGKEYKCKVSNKALPAPIEKTISKAKGQPREPQVYTLPPSREEMTKNQVSLTCLVKGFYPSDIAVEWESNGQPENNYKTTPPVLDSDGSFFLYSKLTVDKSRWQQGNVFSCSVMHEALHNHYTQKSLSLSPGK

SEQ ID NO: 17782 - protein, 122 aa, Artificial Sequence; identical to SEQ ID NO: 12278
  Description of Artificial Sequence: Synthetic polypeptide
  VH of XENP018240

SEQ ID NO: 17783 - protein, 5 aa, Artificial Sequence
  Description of Artificial Sequence: Synthetic peptide
  XENP018240 vhCDR1
NYWMN

SEQ ID NO: 17784 - protein, 19 aa, Artificial Sequence
  Description of Artificial Sequence: Synthetic peptide
  XENP018240 vhCDR2
EIRLKSNNYATDYAEPVKG

SEQ ID NO: 17785 - protein, 11 aa, Artificial Sequence
  Description of Artificial Sequence: Synthetic peptide
  XENP018240 vhCDR3
YYGNYGGYFDV

SEQ ID NO: 17786 - protein, 214 aa, Artificial Sequence; identical to SEQ ID NO: 16226
  Description of Artificial Sequence: Synthetic polypeptide
  XENP018240 1G6_H1.139_L1_IgG1_PVA_/S267K Light Chain

SEQ ID NO: 17787 - protein, 107 aa, Artificial Sequence; identical to SEQ ID NO: 10923
  Description of Artificial Sequence: Synthetic polypeptide
  VL of XENP018240

SEQ ID NO: 17788 - protein, 11 aa, Artificial Sequence
  Description of Artificial Sequence: Synthetic peptide
  XENP018240 vlCDR1
RASQSVSNDVA

SEQ ID NO: 17789 - protein, 7 aa, Artificial Sequence
  Description of Artificial Sequence: Synthetic peptide
  XENP018240 vlCDR2
YASHRYT

SEQ ID NO: 17790 - protein, 9 aa, Artificial Sequence
  Description of Artificial Sequence: Synthetic peptide
  XENP018240 vlCDR3
QQDYSSPRT

SEQ ID NO: 17791 - protein, 451 aa, Artificial Sequence
  Description of Artificial Sequence: Synthetic polypeptide
  XENP018241 1G6_H1.140_L1_IgG1_PVA_/S267K Heavy Chain
EVQLVESGGGLVKPGGSLRLSCAASGFTFSNYWMNWVRQAPGKGLEWVGEIRLKSNNYATFYAEPVKGRFTISRDDSKSTVYLQMNSLKTEDTAVYYCTRYYGNYGGYFDVWGAGTLVTVSSASTKGPSVFPLAPSSKSTSGGTAALGCLVKDYFPEPVTVSWNSGALTSGVHTFPAVLQSSGLYSLSSVVTVPSSSLGTQTYICNVNHKPSNTKVDKKVEPKSCDKTHTCPPCPAPPVAGPSVFLFPPKPKDTLMISRTPEVTCVVVDVKHEDPEVKFNWYVDGVEVHNAKTKPREEQYNSTYRVVSVLTVLHQDWLNGKEYKCKVSNKALPAPIEKTISKAKGQPREPQVYTLPPSREEMTKNQVSLTCLVKGFYPSDIAVEWESNGQPENNYKTTPPVLDSDGSFFLYSKLTVDKSRWQQGNVFSCSVMHEALHNHYTQKSLSLSPGK

SEQ ID NO: 17792 - protein, 122 aa, Artificial Sequence; identical to SEQ ID NO: 12287
  Description of Artificial Sequence: Synthetic polypeptide
  VH of XENP018241

SEQ ID NO: 17793 - protein, 5 aa, Artificial Sequence
  Description of Artificial Sequence: Synthetic peptide
  XENP018241 vhCDR1
NYWMN

SEQ ID NO: 17794 - protein, 19 aa, Artificial Sequence
  Description of Artificial Sequence: Synthetic peptide
  XENP018241 vhCDR2
EIRLKSNNYATFYAEPVKG

SEQ ID NO: 17795 - protein, 11 aa, Artificial Sequence
  Description of Artificial Sequence: Synthetic peptide
  XENP018241 vhCDR3
YYGNYGGYFDV

SEQ ID NO: 17796 - protein, 214 aa, Artificial Sequence; identical to SEQ ID NO: 16226
  Description of Artificial Sequence: Synthetic polypeptide
  XENP018241 1G6_H1.140_L1_IgG1_PVA_/S267K Light Chain

SEQ ID NO: 17797 - protein, 107 aa, Artificial Sequence; identical to SEQ ID NO: 10923
  Description of Artificial Sequence: Synthetic polypeptide
  VL of XENP018241

SEQ ID NO: 17798 - protein, 11 aa, Artificial Sequence
  Description of Artificial Sequence: Synthetic peptide
  XENP018241 vlCDR1
RASQSVSNDVA

SEQ ID NO: 17799 - protein, 7 aa, Artificial Sequence
  Description of Artificial Sequence: Synthetic peptide
  XENP018241 vlCDR2
YASHRYT

SEQ ID NO: 17800 - protein, 9 aa, Artificial Sequence
  Description of Artificial Sequence: Synthetic peptide
  XENP018241 vlCDR3
QQDYSSPRT

SEQ ID NO: 17801 - protein, 451 aa, Artificial Sequence
  Description of Artificial Sequence: Synthetic polypeptide
  XENP018242 1G6_H1.141_L1_IgG1_PVA_/S267K Heavy Chain
EVQLVESGGGLVKPGGSLRLSCAASGFTFSNYWMNWVRQAPGKGLEWVGEIRLKSNNYATAYAEPVKGRFTISRDDSKSTVYLQMNSLKTEDTAVYYCTRYYGNYGGYFDVWGAGTLVTVSSASTKGPSVFPLAPSSKSTSGGTAALGCLVKDYFPEPVTVSWNSGALTSGVHTFPAVLQSSGLYSLSSVVTVPSSSLGTQTYICNVNHKPSNTKVDKKVEPKSCDKTHTCPPCPAPPVAGPSVFLFPPKPKDTLMISRTPEVTCVVVDVKHEDPEVKFNWYVDGVEVHNAKTKPREEQYNSTYRVVSVLTVLHQDWLNGKEYKCKVSNKALPAPIEKTISKAKGQPREPQVYTLPPSREEMTKNQVSLTCLVKGFYPSDIAVEWESNGQPENNYKTTPPVLDSDGSFFLYSKLTVDKSRWQQGNVFSCSVMHEALHNHYTQKSLSLSPGK

SEQ ID NO: 17802 - protein, 122 aa, Artificial Sequence; identical to SEQ ID NO: 12296
  Description of Artificial Sequence: Synthetic polypeptide
  VH of XENP018242

SEQ ID NO: 17803 - protein, 5 aa, Artificial Sequence
  Description of Artificial Sequence: Synthetic peptide
  XENP018242 vhCDR1
NYWMN

SEQ ID NO: 17804 - protein, 19 aa, Artificial Sequence
  Description of Artificial Sequence: Synthetic peptide
  XENP018242 vhCDR2
EIRLKSNNYATAYAEPVKG

SEQ ID NO: 17805 - protein, 11 aa, Artificial Sequence
  Description of Artificial Sequence: Synthetic peptide
  XENP018242 vhCDR3
YYGNYGGYFDV

SEQ ID NO: 17806 - protein, 214 aa, Artificial Sequence; identical to SEQ ID NO: 16226
  Description of Artificial Sequence: Synthetic polypeptide
  XENP018242 1G6_H1.141_L1_IgG1_PVA_/S267K Light Chain

SEQ ID NO: 17807 - protein, 107 aa, Artificial Sequence; identical to SEQ ID NO: 10923
  Description of Artificial Sequence: Synthetic polypeptide
  VL of XENP018242

SEQ ID NO: 17808 - protein, 11 aa, Artificial Sequence
  Description of Artificial Sequence: Synthetic peptide
  XENP018242 vlCDR1
RASQSVSNDVA

SEQ ID NO: 17809 - protein, 7 aa, Artificial Sequence
  Description of Artificial Sequence: Synthetic peptide
  XENP018242 vlCDR2
YASHRYT

SEQ ID NO: 17810 - protein, 9 aa, Artificial Sequence
  Description of Artificial Sequence: Synthetic peptide
  XENP018242 vlCDR3
QQDYSSPRT

SEQ ID NO: 17811 - protein, 451 aa, Artificial Sequence
  Description of Artificial Sequence: Synthetic polypeptide
  XENP018243 1G6_H1.142_L1_IgG1_PVA_/S267K Heavy Chain
EVQLVESGGGLVKPGGSLRLSCAASGFTFSNYWMNWVRQAPGKGLEWVGEIRLKSNNYATTYAEPVKGRFTISRDDSKSTVYLQMNSLKTEDTAVYYCTRYYGNYGGYFDVWGAGTLVTVSSASTKGPSVFPLAPSSKSTSGGTAALGCLVKDYFPEPVTVSWNSGALTSGVHTFPAVLQSSGLYSLSSVVTVPSSSLGTQTYICNVNHKPSNTKVDKKVEPKSCDKTHTCPPCPAPPVAGPSVFLFPPKPKDTLMISRTPEVTCVVVDVKHEDPEVKFNWYVDGVEVHNAKTKPREEQYNSTYRVVSVLTVLHQDWLNGKEYKCKVSNKALPAPIEKTISKAKGQPREPQVYTLPPSREEMTKNQVSLTCLVKGFYPSDIAVEWESNGQPENNYKTTPPVLDSDGSFFLYSKLTVDKSRWQQGNVFSCSVMHEALHNHYTQKSLSLSPGK

SEQ ID NO: 17812 - protein, 122 aa, Artificial Sequence; identical to SEQ ID NO: 12305
  Description of Artificial Sequence: Synthetic polypeptide
  VH of XENP018243

SEQ ID NO: 17813 - protein, 5 aa, Artificial Sequence
  Description of Artificial Sequence: Synthetic peptide
  XENP018243 vhCDR1
NYWMN

SEQ ID NO: 17814 - protein, 19 aa, Artificial Sequence
  Description of Artificial Sequence: Synthetic peptide
  XENP018243 vhCDR2
EIRLKSNNYATTYAEPVKG

SEQ ID NO: 17815 - protein, 11 aa, Artificial Sequence
  Description of Artificial Sequence: Synthetic peptide
  XENP018243 vhCDR3
YYGNYGGYFDV

SEQ ID NO: 17816 - protein, 214 aa, Artificial Sequence; identical to SEQ ID NO: 16226
  Description of Artificial Sequence: Synthetic polypeptide
  XENP018243 1G6_H1.142_L1_IgG1_PVA_/S267K Light Chain

SEQ ID NO: 17817 - protein, 107 aa, Artificial Sequence; identical to SEQ ID NO: 10923
  Description of Artificial Sequence: Synthetic polypeptide
  VL of XENP018243

SEQ ID NO: 17818 - protein, 11 aa, Artificial Sequence
  Description of Artificial Sequence: Synthetic peptide
  XENP018243 vlCDR1
RASQSVSNDVA

SEQ ID NO: 17819 - protein, 7 aa, Artificial Sequence
  Description of Artificial Sequence: Synthetic peptide
  XENP018243 vlCDR2
YASHRYT

SEQ ID NO: 17820 - protein, 9 aa, Artificial Sequence
  Description of Artificial Sequence: Synthetic peptide
  XENP018243 vlCDR3
QQDYSSPRT

SEQ ID NO: 17821 - protein, 451 aa, Artificial Sequence
  Description of Artificial Sequence: Synthetic polypeptide
  XENP018244 1G6_H1.143_L1_IgG1_PVA_/S267K Heavy Chain
EVQLVESGGGLVKPGGSLRLSCAASGFTFSNYWMNWVRQAPGKGLEWVGEIRLKSNNYATKYAEPVKGRFTISRDDSKSTVYLQMNSLKTEDTAVYYCTRYYGNYGGYFDVWGAGTLVTVSSASTKGPSVFPLAPSSKSTSGGTAALGCLVKDYFPEPVTVSWNSGALTSGVHTFPAVLQSSGLYSLSSVVTVPSSSLGTQTYICNVNHKPSNTKVDKKVEPKSCDKTHTCPPCPAPPVAGPSVFLFPPKPKDTLMISRTPEVTCVVVDVKHEDPEVKFNWYVDGVEVHNAKTKPREEQYNSTYRVVSVLTVLHQDWLNGKEYKCKVSNKALPAPIEKTISKAKGQPREPQVYTLPPSREEMTKNQVSLTCLVKGFYPSDIAVEWESNGQPENNYKTTPPVLDSDGSFFLYSKLTVDKSRWQQGNVFSCSVMHEALHNHYTQKSLSLSPGK

SEQ ID NO: 17822 - protein, 122 aa, Artificial Sequence; identical to SEQ ID NO: 12314
  Description of Artificial Sequence: Synthetic polypeptide
  VH of XENP018244

SEQ ID NO: 17823 - protein, 5 aa, Artificial Sequence
  Description of Artificial Sequence: Synthetic peptide
  XENP018244 vhCDR1
NYWMN

SEQ ID NO: 17824 - protein, 19 aa, Artificial Sequence
  Description of Artificial Sequence: Synthetic peptide
  XENP018244 vhCDR2
EIRLKSNNYATKYAEPVKG

SEQ ID NO: 17825 - protein, 11 aa, Artificial Sequence
  Description of Artificial Sequence: Synthetic peptide
  XENP018244 vhCDR3
YYGNYGGYFDV

SEQ ID NO: 17826 - protein, 214 aa, Artificial Sequence; identical to SEQ ID NO: 16226
  Description of Artificial Sequence: Synthetic polypeptide
  XENP018244 1G6_H1.143_L1_IgG1_PVA_/S267K Light Chain

SEQ ID NO: 17827 - protein, 107 aa, Artificial Sequence; identical to SEQ ID NO: 10923
  Description of Artificial Sequence: Synthetic polypeptide
  VL of XENP018244

SEQ ID NO: 17828 - protein, 11 aa, Artificial Sequence
  Description of Artificial Sequence: Synthetic peptide
  XENP018244 vlCDR1
RASQSVSNDVA

SEQ ID NO: 17829 - protein, 7 aa, Artificial Sequence
  Description of Artificial Sequence: Synthetic peptide
  XENP018244 vlCDR2
YASHRYT

SEQ ID NO: 17830 - protein, 9 aa, Artificial Sequence
  Description of Artificial Sequence: Synthetic peptide
  XENP018244 vlCDR3
QQDYSSPRT

SEQ ID NO: 17831 - protein, 451 aa, Artificial Sequence
  Description of Artificial Sequence: Synthetic polypeptide
  XENP018245 1G6_H1.144_L1_IgG1_PVA_/S267K Heavy Chain
EVQLVESGGGLVKPGGSLRLSCAASGFTFSNYWMNWVRQAPGKGLEWVGEIRLKSNNYATGYAEPVKGRFTISRDDSKSTVYLQMNSLKTEDTAVYYCTRYYGNYGGYFDVWGAGTLVTVSSASTKGPSVFPLAPSSKSTSGGTAALGCLVKDYFPEPVTVSWNSGALTSGVHTFPAVLQSSGLYSLSSVVTVPSSSLGTQTYICNVNHKPSNTKVDKKVEPKSCDKTHTCPPCPAPPVAGPSVFLFPPKPKDTLMISRTPEVTCVVVDVKHEDPEVKFNWYVDGVEVHNAKTKPREEQYNSTYRVVSVLTVLHQDWLNGKEYKCKVSNKALPAPIEKTISKAKGQPREPQVYTLPPSREEMTKNQVSLTCLVKGFYPSDIAVEWESNGQPENNYKTTPPVLDSDGSFFLYSKLTVDKSRWQQGNVFSCSVMHEALHNHYTQKSLSLSPGK

SEQ ID NO: 17832 - protein, 122 aa, Artificial Sequence; identical to SEQ ID NO: 12323
  Description of Artificial Sequence: Synthetic polypeptide
  VH of XENP018245

SEQ ID NO: 17833 - protein, 5 aa, Artificial Sequence
  Description of Artificial Sequence: Synthetic peptide
  XENP018245 vhCDR1
NYWMN

SEQ ID NO: 17834 - protein, 19 aa, Artificial Sequence
  Description of Artificial Sequence: Synthetic peptide
  XENP018245 vhCDR2
EIRLKSNNYATGYAEPVKG

SEQ ID NO: 17835 - protein, 11 aa, Artificial Sequence
  Description of Artificial Sequence: Synthetic peptide
  XENP018245 vhCDR3
YYGNYGGYFDV

SEQ ID NO: 17836 - protein, 214 aa, Artificial Sequence; identical to SEQ ID NO: 16226
  Description of Artificial Sequence: Synthetic polypeptide
  XENP018245 1G6_H1.144_L1_IgG1_PVA_/S267K Light Chain

SEQ ID NO: 17837 - protein, 107 aa, Artificial Sequence; identical to SEQ ID NO: 10923
  Description of Artificial Sequence: Synthetic polypeptide
  VL of XENP018245

SEQ ID NO: 17838 - protein, 11 aa, Artificial Sequence
  Description of Artificial Sequence: Synthetic peptide
  XENP018245 vlCDR1
RASQSVSNDVA

SEQ ID NO: 17839 - protein, 7 aa, Artificial Sequence
  Description of Artificial Sequence: Synthetic peptide
  XENP018245 vlCDR2
YASHRYT

SEQ ID NO: 17840 - protein, 9 aa, Artificial Sequence
  Description of Artificial Sequence: Synthetic peptide
  XENP018245 vlCDR3
QQDYSSPRT

SEQ ID NO: 17841 - protein, 451 aa, Artificial Sequence
  Description of Artificial Sequence: Synthetic polypeptide
  XENP018246 1G6_H1.145_L1_IgG1_PVA_/S267K Heavy Chain
EVQLVESGGGLVKPGGSLRLSCAASGFTFSNYWMNWVRQAPGKGLEWVGEIRLKSNNYATLYAEPVKGRFTISRDDSKSTVYLQMNSLKTEDTAVYYCTRYYGNYGGYFDVWGAGTLVTVSSASTKGPSVFPLAPSSKSTSGGTAALGCLVKDYFPEPVTVSWNSGALTSGVHTFPAVLQSSGLYSLSSVVTVPSSSLGTQTYICNVNHKPSNTKVDKKVEPKSCDKTHTCPPCPAPPVAGPSVFLFPPKPKDTLMISRTPEVTCVVVDVKHEDPEVKFNWYVDGVEVHNAKTKPREEQYNSTYRVVSVLTVLHQDWLNGKEYKCKVSNKALPAPIEKTISKAKGQPREPQVYTLPPSREEMTKNQVSLTCLVKGFYPSDIAVEWESNGQPENNYKTTPPVLDSDGSFFLYSKLTVDKSRWQQGNVFSCSVMHEALHNHYTQKSLSLSPGK

SEQ ID NO: 17842 - protein, 122 aa, Artificial Sequence; identical to SEQ ID NO: 12332
  Description of Artificial Sequence: Synthetic polypeptide
  VH of XENP018246

SEQ ID NO: 17843 - protein, 5 aa, Artificial Sequence
  Description of Artificial Sequence: Synthetic peptide
  XENP018246 vhCDR1
NYWMN

SEQ ID NO: 17844 - protein, 19 aa, Artificial Sequence
  Description of Artificial Sequence: Synthetic peptide
  XENP018246 vhCDR2
EIRLKSNNYATLYAEPVKG

SEQ ID NO: 17845 - protein, 11 aa, Artificial Sequence
  Description of Artificial Sequence: Synthetic peptide
  XENP018246 vhCDR3
YYGNYGGYFDV

SEQ ID NO: 17846 - protein, 214 aa, Artificial Sequence; identical to SEQ ID NO: 16226
  Description of Artificial Sequence: Synthetic polypeptide
  XENP018246 1G6_H1.145_L1_IgG1_PVA_/S267K Light Chain

SEQ ID NO: 17847 - protein, 107 aa, Artificial Sequence; identical to SEQ ID NO: 10923
  Description of Artificial Sequence: Synthetic polypeptide
  VL of XENP018246

SEQ ID NO: 17848 - protein, 11 aa, Artificial Sequence
  Description of Artificial Sequence: Synthetic peptide
  XENP018246 vlCDR1
RASQSVSNDVA

SEQ ID NO: 17849 - protein, 7 aa, Artificial Sequence
  Description of Artificial Sequence: Synthetic peptide
  XENP018246 vlCDR2
YASHRYT

SEQ ID NO: 17850 - protein, 9 aa, Artificial Sequence
  Description of Artificial Sequence: Synthetic peptide
  XENP018246 vlCDR3
QQDYSSPRT

SEQ ID NO: 17851 - protein, 451 aa, Artificial Sequence
  Description of Artificial Sequence: Synthetic polypeptide
  XENP018247 1G6_H1.146_L1_IgG1_PVA_/S267K Heavy Chain
EVQLVESGGGLVKPGGSLRLSCAASGFTFSNYWMNWVRQAPGKGLEWVGEIRLKSNNYATHYPEPVKGRFTISRDDSKSTVYLQMNSLKTEDTAVYYCTRYYGNYGGYFDVWGAGTLVTVSSASTKGPSVFPLAPSSKSTSGGTAALGCLVKDYFPEPVTVSWNSGALTSGVHTFPAVLQSSGLYSLSSVVTVPSSSLGTQTYICNVNHKPSNTKVDKKVEPKSCDKTHTCPPCPAPPVAGPSVFLFPPKPKDTLMISRTPEVTCVVVDVKHEDPEVKFNWYVDGVEVHNAKTKPREEQYNSTYRVVSVLTVLHQDWLNGKEYKCKVSNKALPAPIEKTISKAKGQPREPQVYTLPPSREEMTKNQVSLTCLVKGFYPSDIAVEWESNGQPENNYKTTPPVLDSDGSFFLYSKLTVDKSRWQQGNVFSCSVMHEALHNHYTQKSLSLSPGK

SEQ ID NO: 17852 - protein, 122 aa, Artificial Sequence; identical to SEQ ID NO: 12341
  Description of Artificial Sequence: Synthetic polypeptide
  VH of XENP018247

SEQ ID NO: 17853 - protein, 5 aa, Artificial Sequence
  Description of Artificial Sequence: Synthetic peptide
  XENP018247 vhCDR1
NYWMN

SEQ ID NO: 17854 - protein, 19 aa, Artificial Sequence
  Description of Artificial Sequence: Synthetic peptide
  XENP018247 vhCDR2
EIRLKSNNYATHYPEPVKG

SEQ ID NO: 17855 - protein, 11 aa, Artificial Sequence
  Description of Artificial Sequence: Synthetic peptide
  XENP018247 vhCDR3
YYGNYGGYFDV

SEQ ID NO: 17856 - protein, 214 aa, Artificial Sequence; identical to SEQ ID NO: 16226
  Description of Artificial Sequence: Synthetic polypeptide
  XENP018247 1G6_H1.146_L1_IgG1_PVA_/S267K Light Chain

SEQ ID NO: 17857 - protein, 107 aa, Artificial Sequence; identical to SEQ ID NO: 10923
  Description of Artificial Sequence: Synthetic polypeptide
  VL of XENP018247

SEQ ID NO: 17858 - protein, 11 aa, Artificial Sequence
  Description of Artificial Sequence: Synthetic peptide
  XENP018247 vlCDR1
RASQSVSNDVA

SEQ ID NO: 17859 - protein, 7 aa, Artificial Sequence
  Description of Artificial Sequence: Synthetic peptide
  XENP018247 vlCDR2
YASHRYT

SEQ ID NO: 17860 - protein, 9 aa, Artificial Sequence
  Description of Artificial Sequence: Synthetic peptide
  XENP018247 vlCDR3
QQDYSSPRT

SEQ ID NO: 17861 - protein, 451 aa, Artificial Sequence
  Description of Artificial Sequence: Synthetic polypeptide
  XENP018248 1G6_H1.147_L1_IgG1_PVA_/S267K Heavy Chain
EVQLVESGGGLVKPGGSLRLSCAASGFTFSNYWMNWVRQAPGKGLEWVGEIRLKSNNYATHYVEPVKGRFTISRDDSKSTVYLQMNSLKTEDTAVYYCTRYYGNYGGYFDVWGAGTLVTVSSASTKGPSVFPLAPSSKSTSGGTAALGCLVKDYFPEPVTVSWNSGALTSGVHTFPAVLQSSGLYSLSSVVTVPSSSLGTQTYICNVNHKPSNTKVDKKVEPKSCDKTHTCPPCPAPPVAGPSVFLFPPKPKDTLMISRTPEVTCVVVDVKHEDPEVKFNWYVDGVEVHNAKTKPREEQYNSTYRVVSVLTVLHQDWLNGKEYKCKVSNKALPAPIEKTISKAKGQPREPQVYTLPPSREEMTKNQVSLTCLVKGFYPSDIAVEWESNGQPENNYKTTPPVLDSDGSFFLYSKLTVDKSRWQQGNVFSCSVMHEALHNHYTQKSLSLSPGK

SEQ ID NO: 17862 - protein, 122 aa, Artificial Sequence; identical to SEQ ID NO: 12350
  Description of Artificial Sequence: Synthetic polypeptide
  VH of XENP018248

SEQ ID NO: 17863 - protein, 5 aa, Artificial Sequence
  Description of Artificial Sequence: Synthetic peptide
  XENP018248 vhCDR1
NYWMN

SEQ ID NO: 17864 - protein, 19 aa, Artificial Sequence
  Description of Artificial Sequence: Synthetic peptide
  XENP018248 vhCDR2
EIRLKSNNYATHYVEPVKG

SEQ ID NO: 17865 - protein, 11 aa, Artificial Sequence
  Description of Artificial Sequence: Synthetic peptide
  XENP018248 vhCDR3
YYGNYGGYFDV

SEQ ID NO: 17866 - protein, 214 aa, Artificial Sequence; identical to SEQ ID NO: 16226
  Description of Artificial Sequence: Synthetic polypeptide
  XENP018248 1G6_H1.147_L1_IgG1_PVA_/S267K Light Chain

SEQ ID NO: 17867 - protein, 107 aa, Artificial Sequence; identical to SEQ ID NO: 10923
  Description of Artificial Sequence: Synthetic polypeptide
  VL of XENP018248

SEQ ID NO: 17868 - protein, 11 aa, Artificial Sequence
  Description of Artificial Sequence: Synthetic peptide
  XENP018248 vlCDR1
RASQSVSNDVA

SEQ ID NO: 17869 - protein, 7 aa, Artificial Sequence
  Description of Artificial Sequence: Synthetic peptide
  XENP018248 vlCDR2
YASHRYT

SEQ ID NO: 17870 - protein, 9 aa, Artificial Sequence
  Description of Artificial Sequence: Synthetic peptide
  XENP018248 vlCDR3
QQDYSSPRT

SEQ ID NO: 17871 - protein, 451 aa, Artificial Sequence
  Description of Artificial Sequence: Synthetic polypeptide
  XENP018249 1G6_H1.148_L1_IgG1_PVA_/S267K Heavy Chain
EVQLVESGGGLVKPGGSLRLSCAASGFTFSNYWMNWVRQAPGKGLEWVGEIRLKSNNYATHYADPVKGRFTISRDDSKSTVYLQMNSLKTEDTAVYYCTRYYGNYGGYFDVWGAGTLVTVSSASTKGPSVFPLAPSSKSTSGGTAALGCLVKDYFPEPVTVSWNSGALTSGVHTFPAVLQSSGLYSLSSVVTVPSSSLGTQTYICNVNHKPSNTKVDKKVEPKSCDKTHTCPPCPAPPVAGPSVFLFPPKPKDTLMISRTPEVTCVVVDVKHEDPEVKFNWYVDGVEVHNAKTKPREEQYNSTYRVVSVLTVLHQDWLNGKEYKCKVSNKALPAPIEKTISKAKGQPREPQVYTLPPSREEMTKNQVSLTCLVKGFYPSDIAVEWESNGQPENNYKTTPPVLDSDGSFFLYSKLTVDKSRWQQGNVFSCSVMHEALHNHYTQKSLSLSPGK

SEQ ID NO: 17872 - protein, 122 aa, Artificial Sequence; identical to SEQ ID NO: 12359
  Description of Artificial Sequence: Synthetic polypeptide
  VH of XENP018249

SEQ ID NO: 17873 - protein, 5 aa, Artificial Sequence
  Description of Artificial Sequence: Synthetic peptide
  XENP018249 vhCDR1
NYWMN

SEQ ID NO: 17874 - protein, 19 aa, Artificial Sequence
  Description of Artificial Sequence: Synthetic peptide
  XENP018249 vhCDR2
EIRLKSNNYATHYADPVKG

SEQ ID NO: 17875 - protein, 11 aa, Artificial Sequence
  Description of Artificial Sequence: Synthetic peptide
  XENP018249 vhCDR3
YYGNYGGYFDV

SEQ ID NO: 17876 - protein, 214 aa, Artificial Sequence; identical to SEQ ID NO: 16226
  Description of Artificial Sequence: Synthetic polypeptide
  XENP018249 1G6_H1.148_L1_IgG1_PVA_/S267K Light Chain

SEQ ID NO: 17877 - protein, 107 aa, Artificial Sequence; identical to SEQ ID NO: 10923
  Description of Artificial Sequence: Synthetic polypeptide
  VL of XENP018249

SEQ ID NO: 17878 - protein, 11 aa, Artificial Sequence
  Description of Artificial Sequence: Synthetic peptide
  XENP018249 vlCDR1
RASQSVSNDVA

SEQ ID NO: 17879 - protein, 7 aa, Artificial Sequence
  Description of Artificial Sequence: Synthetic peptide
  XENP018249 vlCDR2
YASHRYT

SEQ ID NO: 17880 - protein, 9 aa, Artificial Sequence
  Description of Artificial Sequence: Synthetic peptide
  XENP018249 vlCDR3
QQDYSSPRT

SEQ ID NO: 17881 - protein, 451 aa, Artificial Sequence
  Description of Artificial Sequence: Synthetic polypeptide
  XENP018250 1G6_H1.149_L1_IgG1_PVA_/S267K Heavy Chain
EVQLVESGGGLVKPGGSLRLSCAASGFTFSNYWMNWVRQAPGKGLEWVGEIRLKSNNYATHYAGPVKGRFTISRDDSKSTVYLQMNSLKTEDTAVYYCTRYYGNYGGYFDVWGAGTLVTVSSASTKGPSVFPLAPSSKSTSGGTAALGCLVKDYFPEPVTVSWNSGALTSGVHTFPAVLQSSGLYSLSSVVTVPSSSLGTQTYICNVNHKPSNTKVDKKVEPKSCDKTHTCPPCPAPPVAGPSVFLFPPKPKDTLMISRTPEVTCVVVDVKHEDPEVKFNWYVDGVEVHNAKTKPREEQYNSTYRVVSVLTVLHQDWLNGKEYKCKVSNKALPAPIEKTISKAKGQPREPQVYTLPPSREEMTKNQVSLTCLVKGFYPSDIAVEWESNGQPENNYKTTPPVLDSDGSFFLYSKLTVDKSRWQQGNVFSCSVMHEALHNHYTQKSLSLSPGK

SEQ ID NO: 17882 - protein, 122 aa, Artificial Sequence; identical to SEQ ID NO: 12368
  Description of Artificial Sequence: Synthetic polypeptide
  VH of XENP018250

SEQ ID NO: 17883 - protein, 5 aa, Artificial Sequence
  Description of Artificial Sequence: Synthetic peptide
  XENP018250 vhCDR1
NYWMN

SEQ ID NO: 17884 - protein, 19 aa, Artificial Sequence
  Description of Artificial Sequence: Synthetic peptide
  XENP018250 vhCDR2
EIRLKSNNYATHYAGPVKG

SEQ ID NO: 17885 - protein, 11 aa, Artificial Sequence
  Description of Artificial Sequence: Synthetic peptide
  XENP018250 vhCDR3
YYGNYGGYFDV

SEQ ID NO: 17886 - protein, 214 aa, Artificial Sequence; identical to SEQ ID NO: 16226
  Description of Artificial Sequence: Synthetic polypeptide
  XENP018250 1G6_H1.149_L1_IgG1_PVA_/S267K Light Chain

SEQ ID NO: 17887 - protein, 107 aa, Artificial Sequence; identical to SEQ ID NO: 10923
  Description of Artificial Sequence: Synthetic polypeptide
  VL of XENP018250

SEQ ID NO: 17888 - protein, 11 aa, Artificial Sequence
  Description of Artificial Sequence: Synthetic peptide
  XENP018250 vlCDR1
RASQSVSNDVA

SEQ ID NO: 17889 - protein, 7 aa, Artificial Sequence
  Description of Artificial Sequence: Synthetic peptide
  XENP018250 vlCDR2
YASHRYT

SEQ ID NO: 17890 - protein, 9 aa, Artificial Sequence
  Description of Artificial Sequence: Synthetic peptide
  XENP018250 vlCDR3
QQDYSSPRT

SEQ ID NO: 17891 - protein, 451 aa, Artificial Sequence
  Description of Artificial Sequence: Synthetic polypeptide
  XENP018251 1G6_H1.150_L1_IgG1_PVA_/S267K Heavy Chain
EVQLVESGGGLVKPGGSLRLSCAASGFTFSNYWMNWVRQAPGKGLEWVGEIRLKSNNYATHYAAPVKGRFTISRDDSKSTVYLQMNSLKTEDTAVYYCTRYYGNYGGYFDVWGAGTLVTVSSASTKGPSVFPLAPSSKSTSGGTAALGCLVKDYFPEPVTVSWNSGALTSGVHTFPAVLQSSGLYSLSSVVTVPSSSLGTQTYICNVNHKPSNTKVDKKVEPKSCDKTHTCPPCPAPPVAGPSVFLFPPKPKDTLMISRTPEVTCVVVDVKHEDPEVKFNWYVDGVEVHNAKTKPREEQYNSTYRVVSVLTVLHQDWLNGKEYKCKVSNKALPAPIEKTISKAKGQPREPQVYTLPPSREEMTKNQVSLTCLVKGFYPSDIAVEWESNGQPENNYKTTPPVLDSDGSFFLYSKLTVDKSRWQQGNVFSCSVMHEALHNHYTQKSLSLSPGK

SEQ ID NO: 17892 - protein, 122 aa, Artificial Sequence; identical to SEQ ID NO: 12377
  Description of Artificial Sequence: Synthetic polypeptide
  VH of XENP018251

SEQ ID NO: 17893 - protein, 5 aa, Artificial Sequence
  Description of Artificial Sequence: Synthetic peptide
  XENP018251 vhCDR1
NYWMN

SEQ ID NO: 17894 - protein, 19 aa, Artificial Sequence
  Description of Artificial Sequence: Synthetic peptide
  XENP018251 vhCDR2
EIRLKSNNYATHYAAPVKG

SEQ ID NO: 17895 - protein, 11 aa, Artificial Sequence
  Description of Artificial Sequence: Synthetic peptide
  XENP018251 vhCDR3
YYGNYGGYFDV

SEQ ID NO: 17896 - protein, 214 aa, Artificial Sequence; identical to SEQ ID NO: 16226
  Description of Artificial Sequence: Synthetic polypeptide
  XENP018251 1G6_H1.150_L1_IgG1_PVA_/S267K Light Chain

SEQ ID NO: 17897 - protein, 107 aa, Artificial Sequence; identical to SEQ ID NO: 10923
  Description of Artificial Sequence: Synthetic polypeptide
  VL of XENP018251

SEQ ID NO: 17898 - protein, 11 aa, Artificial Sequence
  Description of Artificial Sequence: Synthetic peptide
  XENP018251 vlCDR1
RASQSVSNDVA

SEQ ID NO: 17899 - protein, 7 aa, Artificial Sequence
  Description of Artificial Sequence: Synthetic peptide
  XENP018251 vlCDR2
YASHRYT

SEQ ID NO: 17900 - protein, 9 aa, Artificial Sequence
  Description of Artificial Sequence: Synthetic peptide
  XENP018251 vlCDR3
QQDYSSPRT

SEQ ID NO: 17901 - protein, 451 aa, Artificial Sequence
  Description of Artificial Sequence: Synthetic polypeptide
  XENP018252 1G6_H1.151_L1_IgG1_PVA_/S267K Heavy Chain
EVQLVESGGGLVKPGGSLRLSCAASGFTFSNYWMNWVRQAPGKGLEWVGEIRLKSNNYATHYAESVKGRFTISRDDSKSTVYLQMNSLKTEDTAVYYCTRYYGNYGGYFDVWGAGTLVTVSSASTKGPSVFPLAPSSKSTSGGTAALGCLVKDYFPEPVTVSWNSGALTSGVHTFPAVLQSSGLYSLSSVVTVPSSSLGTQTYICNVNHKPSNTKVDKKVEPKSCDKTHTCPPCPAPPVAGPSVFLFPPKPKDTLMISRTPEVTCVVVDVKHEDPEVKFNWYVDGVEVHNAKTKPREEQYNSTYRVVSVLTVLHQDWLNGKEYKCKVSNKALPAPIEKTISKAKGQPREPQVYTLPPSREEMTKNQVSLTCLVKGFYPSDIAVEWESNGQPENNYKTTPPVLDSDGSFFLYSKLTVDKSRWQQGNVFSCSVMHEALHNHYTQKSLSLSPGK

SEQ ID NO: 17902 - protein, 122 aa, Artificial Sequence; identical to SEQ ID NO: 12386
  Description of Artificial Sequence: Synthetic polypeptide
  VH of XENP018252

SEQ ID NO: 17903 - protein, 5 aa, Artificial Sequence
  Description of Artificial Sequence: Synthetic peptide
  XENP018252 vhCDR1
NYWMN

SEQ ID NO: 17904 - protein, 19 aa, Artificial Sequence
  Description of Artificial Sequence: Synthetic peptide
  XENP018252 vhCDR2
EIRLKSNNYATHYAESVKG

SEQ ID NO: 17905 - protein, 11 aa, Artificial Sequence
  Description of Artificial Sequence: Synthetic peptide
  XENP018252 vhCDR3
YYGNYGGYFDV

SEQ ID NO: 17906 - protein, 214 aa, Artificial Sequence; identical to SEQ ID NO: 16226
  Description of Artificial Sequence: Synthetic polypeptide
  XENP018252 1G6_H1.151_L1_IgG1_PVA_/S267K Light Chain

SEQ ID NO: 17907 - protein, 107 aa, Artificial Sequence; identical to SEQ ID NO: 10923
  Description of Artificial Sequence: Synthetic polypeptide
  VL of XENP018252

SEQ ID NO: 17908 - protein, 11 aa, Artificial Sequence
  Description of Artificial Sequence: Synthetic peptide
  XENP018252 vlCDR1
RASQSVSNDVA

SEQ ID NO: 17909 - protein, 7 aa, Artificial Sequence
  Description of Artificial Sequence: Synthetic peptide
  XENP018252 vlCDR2
YASHRYT

SEQ ID NO: 17910 - protein, 9 aa, Artificial Sequence
  Description of Artificial Sequence: Synthetic peptide
  XENP018252 vlCDR3
QQDYSSPRT

SEQ ID NO: 17911 - protein, 451 aa, Artificial Sequence
  Description of Artificial Sequence: Synthetic polypeptide
  XENP018253 1G6_H1.152_L1_IgG1_PVA_/S267K Heavy Chain
EVQLVESGGGLVKPGGSLRLSCAASGFTFSNYWMNWVRQAPGKGLEWVGEIRLKSNNYATHYAEPVKGRFTISRDNSKSTVYLQMNSLKTEDTAVYYCTRYYGNYGGYFDVWGAGTLVTVSSASTKGPSVFPLAPSSKSTSGGTAALGCLVKDYFPEPVTVSWNSGALTSGVHTFPAVLQSSGLYSLSSVVTVPSSSLGTQTYICNVNHKPSNTKVDKKVEPKSCDKTHTCPPCPAPPVAGPSVFLFPPKPKDTLMISRTPEVTCVVVDVKHEDPEVKFNWYVDGVEVHNAKTKPREEQYNSTYRVVSVLTVLHQDWLNGKEYKCKVSNKALPAPIEKTISKAKGQPREPQVYTLPPSREEMTKNQVSLTCLVKGFYPSDIAVEWESNGQPENNYKTTPPVLDSDGSFFLYSKLTVDKSRWQQGNVFSCSVMHEALHNHYTQKSLSLSPGK

SEQ ID NO: 17912 - protein, 122 aa, Artificial Sequence; identical to SEQ ID NO: 12395
  Description of Artificial Sequence: Synthetic polypeptide
  VH of XENP018253

SEQ ID NO: 17913 - protein, 5 aa, Artificial Sequence
  Description of Artificial Sequence: Synthetic peptide
  XENP018253 vhCDR1
NYWMN

SEQ ID NO: 17914 - protein, 19 aa, Artificial Sequence
  Description of Artificial Sequence: Synthetic peptide
  XENP018253 vhCDR2
EIRLKSNNYATHYAEPVKG

SEQ ID NO: 17915 - protein, 11 aa, Artificial Sequence
  Description of Artificial Sequence: Synthetic peptide
  XENP018253 vhCDR3
YYGNYGGYFDV

SEQ ID NO: 17916 - protein, 214 aa, Artificial Sequence; identical to SEQ ID NO: 16226
  Description of Artificial Sequence: Synthetic polypeptide
  XENP018253 1G6_H1.152_L1_IgG1_PVA_/S267K Light Chain

SEQ ID NO: 17917 - protein, 107 aa, Artificial Sequence; identical to SEQ ID NO: 10923
  Description of Artificial Sequence: Synthetic polypeptide
  VL of XENP018253

SEQ ID NO: 17918 - protein, 11 aa, Artificial Sequence
  Description of Artificial Sequence: Synthetic peptide
  XENP018253 vlCDR1
RASQSVSNDVA

SEQ ID NO: 17919 - protein, 7 aa, Artificial Sequence
  Description of Artificial Sequence: Synthetic peptide
  XENP018253 vlCDR2
YASHRYT

SEQ ID NO: 17920 - protein, 9 aa, Artificial Sequence
  Description of Artificial Sequence: Synthetic peptide
  XENP018253 vlCDR3
QQDYSSPRT

SEQ ID NO: 17921 - protein, 451 aa, Artificial Sequence
  Description of Artificial Sequence: Synthetic polypeptide
  XENP018254 1G6_H1.153_L1_IgG1_PVA_/S267K Heavy Chain
EVQLVESGGGLVKPGGSLRLSCAASGFTFSNYWMNWVRQAPGKGLEWVGEIRLKSNNYATHYAEPVKGRFTISRDDSKNTVYLQMNSLKTEDTAVYYCTRYYGNYGGYFDVWGAGTLVTVSSASTKGPSVFPLAPSSKSTSGGTAALGCLVKDYFPEPVTVSWNSGALTSGVHTFPAVLQSSGLYSLSSVVTVPSSSLGTQTYICNVNHKPSNTKVDKKVEPKSCDKTHTCPPCPAPPVAGPSVFLFPPKPKDTLMISRTPEVTCVVVDVKHEDPEVKFNWYVDGVEVHNAKTKPREEQYNSTYRVVSVLTVLHQDWLNGKEYKCKVSNKALPAPIEKTISKAKGQPREPQVYTLPPSREEMTKNQVSLTCLVKGFYPSDIAVEWESNGQPENNYKTTPPVLDSDGSFFLYSKLTVDKSRWQQGNVFSCSVMHEALHNHYTQKSLSLSPGK

SEQ ID NO: 17922 - protein, 122 aa, Artificial Sequence; identical to SEQ ID NO: 12404
  Description of Artificial Sequence: Synthetic polypeptide
  VH of XENP018254

SEQ ID NO: 17923 - protein, 5 aa, Artificial Sequence
  Description of Artificial Sequence: Synthetic peptide
  XENP018254 vhCDR1
NYWMN

SEQ ID NO: 17924 - protein, 19 aa, Artificial Sequence
  Description of Artificial Sequence: Synthetic peptide
  XENP018254 vhCDR2
EIRLKSNNYATHYAEPVKG

SEQ ID NO: 17925 - protein, 11 aa, Artificial Sequence
  Description of Artificial Sequence: Synthetic peptide
  XENP018254 vhCDR3
YYGNYGGYFDV

SEQ ID NO: 17926 - protein, 214 aa, Artificial Sequence; identical to SEQ ID NO: 16226
  Description of Artificial Sequence: Synthetic polypeptide
  XENP018254 1G6_H1.153_L1_IgG1_PVA_/S267K Light Chain

SEQ ID NO: 17927 - protein, 107 aa, Artificial Sequence; identical to SEQ ID NO: 10923
  Description of Artificial Sequence: Synthetic polypeptide
  VL of XENP018254

SEQ ID NO: 17928 - protein, 11 aa, Artificial Sequence
  Description of Artificial Sequence: Synthetic peptide
  XENP018254 vlCDR1
RASQSVSNDVA

SEQ ID NO: 17929 - protein, 7 aa, Artificial Sequence
  Description of Artificial Sequence: Synthetic peptide
  XENP018254 vlCDR2
YASHRYT

SEQ ID NO: 17930 - protein, 9 aa, Artificial Sequence
  Description of Artificial Sequence: Synthetic peptide
  XENP018254 vlCDR3
QQDYSSPRT

SEQ ID NO: 17931 - protein, 451 aa, Artificial Sequence
  Description of Artificial Sequence: Synthetic polypeptide
  XENP018255 1G6_H1.154_L1_IgG1_PVA_/S267K Heavy Chain
EVQLVESGGGLVKPGGSLRLSCAASGFTFSNYWMNWVRQAPGKGLEWVGEIRLKSNNYATHYAEPVKGRFTISRDDSKSSVYLQMNSLKTEDTAVYYCTRYYGNYGGYFDVWGAGTLVTVSSASTKGPSVFPLAPSSKSTSGGTAALGCLVKDYFPEPVTVSWNSGALTSGVHTFPAVLQSSGLYSLSSVVTVPSSSLGTQTYICNVNHKPSNTKVDKKVEPKSCDKTHTCPPCPAPPVAGPSVFLFPPKPKDTLMISRTPEVTCVVVDVKHEDPEVKFNWYVDGVEVHNAKTKPREEQYNSTYRVVSVLTVLHQDWLNGKEYKCKVSNKALPAPIEKTISKAKGQPREPQVYTLPPSREEMTKNQVSLTCLVKGFYPSDIAVEWESNGQPENNYKTTPPVLDSDGSFFLYSKLTVDKSRWQQGNVFSCSVMHEALHNHYTQKSLSLSPGK

SEQ ID NO: 17932 - protein, 122 aa, Artificial Sequence; identical to SEQ ID NO: 12413
  Description of Artificial Sequence: Synthetic polypeptide
  VH of XENP018255

SEQ ID NO: 17933 - protein, 5 aa, Artificial Sequence
  Description of Artificial Sequence: Synthetic peptide
  XENP018255 vhCDR1
NYWMN

SEQ ID NO: 17934 - protein, 19 aa, Artificial Sequence
  Description of Artificial Sequence: Synthetic peptide
  XENP018255 vhCDR2
EIRLKSNNYATHYAEPVKG

SEQ ID NO: 17935 - protein, 11 aa, Artificial Sequence
  Description of Artificial Sequence: Synthetic peptide
  XENP018255 vhCDR3
YYGNYGGYFDV

SEQ ID NO: 17936 - protein, 214 aa, Artificial Sequence; identical to SEQ ID NO: 16226
  Description of Artificial Sequence: Synthetic polypeptide
  XENP018255 1G6_H1.154_L1_IgG1_PVA_/S267K Light Chain

SEQ ID NO: 17937 - protein, 107 aa, Artificial Sequence; identical to SEQ ID NO: 10923
  Description of Artificial Sequence: Synthetic polypeptide
  VL of XENP018255

SEQ ID NO: 17938 - protein, 11 aa, Artificial Sequence
  Description of Artificial Sequence: Synthetic peptide
  XENP018255 vlCDR1
RASQSVSNDVA

SEQ ID NO: 17939 - protein, 7 aa, Artificial Sequence
  Description of Artificial Sequence: Synthetic peptide
  XENP018255 vlCDR2
YASHRYT

SEQ ID NO: 17940 - protein, 9 aa, Artificial Sequence
  Description of Artificial Sequence: Synthetic peptide
  XENP018255 vlCDR3
QQDYSSPRT

SEQ ID NO: 17941 - protein, 451 aa, Artificial Sequence
  Description of Artificial Sequence: Synthetic polypeptide
  XENP018256 1G6_H1.155_L1_IgG1_PVA_/S267K Heavy Chain
EVQLVESGGGLVKPGGSLRLSCAASGFTFSNYWMNWVRQAPGKGLEWVGEIRLKSNNYATHYAEPVKGRFTISRDDSKSTLYLQMNSLKTEDTAVYYCTRYYGNYGGYFDVWGAGTLVTVSSASTKGPSVFPLAPSSKSTSGGTAALGCLVKDYFPEPVTVSWNSGALTSGVHTFPAVLQSSGLYSLSSVVTVPSSSLGTQTYICNVNHKPSNTKVDKKVEPKSCDKTHTCPPCPAPPVAGPSVFLFPPKPKDTLMISRTPEVTCVVVDVKHEDPEVKFNWYVDGVEVHNAKTKPREEQYNSTYRVVSVLTVLHQDWLNGKEYKCKVSNKALPAPIEKTISKAKGQPREPQVYTLPPSREEMTKNQVSLTCLVKGFYPSDIAVEWESNGQPENNYKTTPPVLDSDGSFFLYSKLTVDKSRWQQGNVFSCSVMHEALHNHYTQKSLSLSPGK

SEQ ID NO: 17942 - protein, 122 aa, Artificial Sequence; identical to SEQ ID NO: 12422
  Description of Artificial Sequence: Synthetic polypeptide
  VH of XENP018256

SEQ ID NO: 17943 - protein, 5 aa, Artificial Sequence
  Description of Artificial Sequence: Synthetic peptide
  XENP018256 vhCDR1
NYWMN

SEQ ID NO: 17944 - protein, 19 aa, Artificial Sequence
  Description of Artificial Sequence: Synthetic peptide
  XENP018256 vhCDR2
EIRLKSNNYATHYAEPVKG

SEQ ID NO: 17945 - protein, 11 aa, Artificial Sequence
  Description of Artificial Sequence: Synthetic peptide
  XENP018256 vhCDR3
YYGNYGGYFDV

SEQ ID NO: 17946 - protein, 214 aa, Artificial Sequence; identical to SEQ ID NO: 16226
  Description of Artificial Sequence: Synthetic polypeptide
  XENP018256 1G6_H1.155_L1_IgG1_PVA_/S267K Light Chain

SEQ ID NO: 17947 - protein, 107 aa, Artificial Sequence; identical to SEQ ID NO: 10923
  Description of Artificial Sequence: Synthetic polypeptide
  VL of XENP018256

SEQ ID NO: 17948 - protein, 11 aa, Artificial Sequence
  Description of Artificial Sequence: Synthetic peptide
  XENP018256 vlCDR1
RASQSVSNDVA

SEQ ID NO: 17949 - protein, 7 aa, Artificial Sequence
  Description of Artificial Sequence: Synthetic peptide
  XENP018256 vlCDR2
YASHRYT

SEQ ID NO: 17950 - protein, 9 aa, Artificial Sequence
  Description of Artificial Sequence: Synthetic peptide
  XENP018256 vlCDR3
QQDYSSPRT

SEQ ID NO: 17951 - protein, 451 aa, Artificial Sequence
  Description of Artificial Sequence: Synthetic polypeptide
  XENP018257 1G6_H1.156_L1_IgG1_PVA_/S267K Heavy Chain
EVQLVESGGGLVKPGGSLRLSCAASGFTFSNYWMNWVRQAPGKGLEWVGEIRLKSNNYATHYAEPVKGRFTISRDDSKSTAYLQMNSLKTEDTAVYYCTRYYGNYGGYFDVWGAGTLVTVSSASTKGPSVFPLAPSSKSTSGGTAALGCLVKDYFPEPVTVSWNSGALTSGVHTFPAVLQSSGLYSLSSVVTVPSSSLGTQTYICNVNHKPSNTKVDKKVEPKSCDKTHTCPPCPAPPVAGPSVFLFPPKPKDTLMISRTPEVTCVVVDVKHEDPEVKFNWYVDGVEVHNAKTKPREEQYNSTYRVVSVLTVLHQDWLNGKEYKCKVSNKALPAPIEKTISKAKGQPREPQVYTLPPSREEMTKNQVSLTCLVKGFYPSDIAVEWESNGQPENNYKTTPPVLDSDGSFFLYSKLTVDKSRWQQGNVFSCSVMHEALHNHYTQKSLSLSPGK

SEQ ID NO: 17952 - protein, 122 aa, Artificial Sequence; identical to SEQ ID NO: 12431
  Description of Artificial Sequence: Synthetic polypeptide
  VH of XENP018257

SEQ ID NO: 17953 - protein, 5 aa, Artificial Sequence
  Description of Artificial Sequence: Synthetic peptide
  XENP018257 vhCDR1
NYWMN

SEQ ID NO: 17954 - protein, 19 aa, Artificial Sequence
  Description of Artificial Sequence: Synthetic peptide
  XENP018257 vhCDR2
EIRLKSNNYATHYAEPVKG

SEQ ID NO: 17955 - protein, 11 aa, Artificial Sequence
  Description of Artificial Sequence: Synthetic peptide
  XENP018257 vhCDR3
YYGNYGGYFDV

SEQ ID NO: 17956 - protein, 214 aa, Artificial Sequence; identical to SEQ ID NO: 16226
  Description of Artificial Sequence: Synthetic polypeptide
  XENP018257 1G6_H1.156_L1_IgG1_PVA_/S267K Light Chain

SEQ ID NO: 17957 - protein, 107 aa, Artificial Sequence; identical to SEQ ID NO: 10923
  Description of Artificial Sequence: Synthetic polypeptide
  VL of XENP018257

SEQ ID NO: 17958 - protein, 11 aa, Artificial Sequence
  Description of Artificial Sequence: Synthetic peptide
  XENP018257 vlCDR1
RASQSVSNDVA

SEQ ID NO: 17959 - protein, 7 aa, Artificial Sequence
  Description of Artificial Sequence: Synthetic peptide
  XENP018257 vlCDR2
YASHRYT

SEQ ID NO: 17960 - protein, 9 aa, Artificial Sequence
  Description of Artificial Sequence: Synthetic peptide
  XENP018257 vlCDR3
QQDYSSPRT

SEQ ID NO: 17961 - protein, 451 aa, Artificial Sequence
  Description of Artificial Sequence: Synthetic polypeptide
  XENP018258 1G6_H1.157_L1_IgG1_PVA_/S267K Heavy Chain
EVQLVESGGGLVKPGGSLRLSCAASGFTFSNYWMNWVRQAPGKGLEWVGEIRLKSNNYATHYAEPVKGRFTISRDDSKSTVYLQMNNLKTEDTAVYYCTRYYGNYGGYFDVWGAGTLVTVSSASTKGPSVFPLAPSSKSTSGGTAALGCLVKDYFPEPVTVSWNSGALTSGVHTFPAVLQSSGLYSLSSVVTVPSSSLGTQTYICNVNHKPSNTKVDKKVEPKSCDKTHTCPPCPAPPVAGPSVFLFPPKPKDTLMISRTPEVTCVVVDVKHEDPEVKFNWYVDGVEVHNAKTKPREEQYNSTYRVVSVLTVLHQDWLNGKEYKCKVSNKALPAPIEKTISKAKGQPREPQVYTLPPSREEMTKNQVSLTCLVKGFYPSDIAVEWESNGQPENNYKTTPPVLDSDGSFFLYSKLTVDKSRWQQGNVFSCSVMHEALHNHYTQKSLSLSPGK

SEQ ID NO: 17962 - protein, 122 aa, Artificial Sequence; identical to SEQ ID NO: 12440
  Description of Artificial Sequence: Synthetic polypeptide
  VH of XENP018258

SEQ ID NO: 17963 - protein, 5 aa, Artificial Sequence
  Description of Artificial Sequence: Synthetic peptide
  XENP018258 vhCDR1
NYWMN

SEQ ID NO: 17964 - protein, 19 aa, Artificial Sequence
  Description of Artificial Sequence: Synthetic peptide
  XENP018258 vhCDR2
EIRLKSNNYATHYAEPVKG

SEQ ID NO: 17965 - protein, 11 aa, Artificial Sequence
  Description of Artificial Sequence: Synthetic peptide
  XENP018258 vhCDR3
YYGNYGGYFDV

SEQ ID NO: 17966 - protein, 214 aa, Artificial Sequence; identical to SEQ ID NO: 16226
  Description of Artificial Sequence: Synthetic polypeptide
  XENP018258 1G6_H1.157_L1_IgG1_PVA_/S267K Light Chain

SEQ ID NO: 17967 - protein, 107 aa, Artificial Sequence; identical to SEQ ID NO: 10923
  Description of Artificial Sequence: Synthetic polypeptide
  VL of XENP018258

SEQ ID NO: 17968 - protein, 11 aa, Artificial Sequence
  Description of Artificial Sequence: Synthetic peptide
  XENP018258 vlCDR1
RASQSVSNDVA

SEQ ID NO: 17969 - protein, 7 aa, Artificial Sequence
  Description of Artificial Sequence: Synthetic peptide
  XENP018258 vlCDR2
YASHRYT

SEQ ID NO: 17970 - protein, 9 aa, Artificial Sequence
  Description of Artificial Sequence: Synthetic peptide
  XENP018258 vlCDR3
QQDYSSPRT

SEQ ID NO: 17971 - protein, 451 aa, Artificial Sequence
  Description of Artificial Sequence: Synthetic polypeptide
  XENP018259 1G6_H1.158_L1_IgG1_PVA_/S267K Heavy Chain
EVQLVESGGGLVKPGGSLRLSCAASGFTFSNYWMNWVRQAPGKGLEWVGEIRLKSNNYATHYAEPVKGRFTISRDDSKSTVYLQMNSLRTEDTAVYYCTRYYGNYGGYFDVWGAGTLVTVSSASTKGPSVFPLAPSSKSTSGGTAALGCLVKDYFPEPVTVSWNSGALTSGVHTFPAVLQSSGLYSLSSVVTVPSSSLGTQTYICNVNHKPSNTKVDKKVEPKSCDKTHTCPPCPAPPVAGPSVFLFPPKPKDTLMISRTPEVTCVVVDVKHEDPEVKFNWYVDGVEVHNAKTKPREEQYNSTYRVVSVLTVLHQDWLNGKEYKCKVSNKALPAPIEKTISKAKGQPREPQVYTLPPSREEMTKNQVSLTCLVKGFYPSDIAVEWESNGQPENNYKTTPPVLDSDGSFFLYSKLTVDKSRWQQGNVFSCSVMHEALHNHYTQKSLSLSPGK

SEQ ID NO: 17972 - protein, 122 aa, Artificial Sequence; identical to SEQ ID NO: 12449
  Description of Artificial Sequence: Synthetic polypeptide
  VH of XENP018259

SEQ ID NO: 17973 - protein, 5 aa, Artificial Sequence
  Description of Artificial Sequence: Synthetic peptide
  XENP018259 vhCDR1
NYWMN

SEQ ID NO: 17974 - protein, 19 aa, Artificial Sequence
  Description of Artificial Sequence: Synthetic peptide
  XENP018259 vhCDR2
EIRLKSNNYATHYAEPVKG

SEQ ID NO: 17975 - protein, 11 aa, Artificial Sequence
  Description of Artificial Sequence: Synthetic peptide
  XENP018259 vhCDR3
YYGNYGGYFDV

SEQ ID NO: 17976 - protein, 214 aa, Artificial Sequence; identical to SEQ ID NO: 16226
  Description of Artificial Sequence: Synthetic polypeptide
  XENP018259 1G6_H1.158_L1_IgG1_PVA_/S267K Light Chain

SEQ ID NO: 17977 - protein, 107 aa, Artificial Sequence; identical to SEQ ID NO: 10923
  Description of Artificial Sequence: Synthetic polypeptide
  VL of XENP018259

SEQ ID NO: 17978 - protein, 11 aa, Artificial Sequence
  Description of Artificial Sequence: Synthetic peptide
  XENP018259 vlCDR1
RASQSVSNDVA

SEQ ID NO: 17979 - protein, 7 aa, Artificial Sequence
  Description of Artificial Sequence: Synthetic peptide
  XENP018259 vlCDR2
YASHRYT

SEQ ID NO: 17980 - protein, 9 aa, Artificial Sequence
  Description of Artificial Sequence: Synthetic peptide
  XENP018259 vlCDR3
QQDYSSPRT

SEQ ID NO: 17981 - protein, 451 aa, Artificial Sequence
  Description of Artificial Sequence: Synthetic polypeptide
  XENP018260 1G6_H1.159_L1_IgG1_PVA_/S267K Heavy Chain
EVQLVESGGGLVKPGGSLRLSCAASGFTFSNYWMNWVRQAPGKGLEWVGEIRLKSNNYATHYAEPVKGRFTISRDDSKSTVYLQMNSLKAEDTAVYYCTRYYGNYGGYFDVWGAGTLVTVSSASTKGPSVFPLAPSSKSTSGGTAALGCLVKDYFPEPVTVSWNSGALTSGVHTFPAVLQSSGLYSLSSVVTVPSSSLGTQTYICNVNHKPSNTKVDKKVEPKSCDKTHTCPPCPAPPVAGPSVFLFPPKPKDTLMISRTPEVTCVVVDVKHEDPEVKFNWYVDGVEVHNAKTKPREEQYNSTYRVVSVLTVLHQDWLNGKEYKCKVSNKALPAPIEKTISKAKGQPREPQVYTLPPSREEMTKNQVSLTCLVKGFYPSDIAVEWESNGQPENNYKTTPPVLDSDGSFFLYSKLTVDKSRWQQGNVFSCSVMHEALHNHYTQKSLSLSPGK

SEQ ID NO: 17982 - protein, 122 aa, Artificial Sequence; identical to SEQ ID NO: 12458
  Description of Artificial Sequence: Synthetic polypeptide
  VH of XENP018260

SEQ ID NO: 17983 - protein, 5 aa, Artificial Sequence
  Description of Artificial Sequence: Synthetic peptide
  XENP018260 vhCDR1
NYWMN

SEQ ID NO: 17984 - protein, 19 aa, Artificial Sequence
  Description of Artificial Sequence: Synthetic peptide
  XENP018260 vhCDR2
EIRLKSNNYATHYAEPVKG

SEQ ID NO: 17985 - protein, 11 aa, Artificial Sequence
  Description of Artificial Sequence: Synthetic peptide
  XENP018260 vhCDR3
YYGNYGGYFDV

SEQ ID NO: 17986 - protein, 214 aa, Artificial Sequence; identical to SEQ ID NO: 16226
  Description of Artificial Sequence: Synthetic polypeptide
  XENP018260 1G6_H1.159_L1_IgG1_PVA_/S267K Light Chain

SEQ ID NO: 17987 - protein, 107 aa, Artificial Sequence; identical to SEQ ID NO: 10923
  Description of Artificial Sequence: Synthetic polypeptide
  VL of XENP018260

SEQ ID NO: 17988 - protein, 11 aa, Artificial Sequence
  Description of Artificial Sequence: Synthetic peptide
  XENP018260 vlCDR1
RASQSVSNDVA

SEQ ID NO: 17989 - protein, 7 aa, Artificial Sequence
  Description of Artificial Sequence: Synthetic peptide
  XENP018260 vlCDR2
YASHRYT

SEQ ID NO: 17990 - protein, 9 aa, Artificial Sequence
  Description of Artificial Sequence: Synthetic peptide
  XENP018260 vlCDR3
QQDYSSPRT

SEQ ID NO: 17991 - protein, 451 aa, Artificial Sequence
  Description of Artificial Sequence: Synthetic polypeptide
  XENP018261 1G6_H1.160_L1_IgG1_PVA_/S267K Heavy Chain
EVQLVESGGGLVKPGGSLRLSCAASGFTFSNYWMNWVRQAPGKGLEWVGEIRLKSNNYATHYAEPVKGRFTISRDDSKSTVYLQMNSLKTEDTGVYYCTRYYGNYGGYFDVWGAGTLVTVSSASTKGPSVFPLAPSSKSTSGGTAALGCLVKDYFPEPVTVSWNSGALTSGVHTFPAVLQSSGLYSLSSVVTVPSSSLGTQTYICNVNHKPSNTKVDKKVEPKSCDKTHTCPPCPAPPVAGPSVFLFPPKPKDTLMISRTPEVTCVVVDVKHEDPEVKFNWYVDGVEVHNAKTKPREEQYNSTYRVVSVLTVLHQDWLNGKEYKCKVSNKALPAPIEKTISKAKGQPREPQVYTLPPSREEMTKNQVSLTCLVKGFYPSDIAVEWESNGQPENNYKTTPPVLDSDGSFFLYSKLTVDKSRWQQGNVFSCSVMHEALHNHYTQKSLSLSPGK

SEQ ID NO: 17992 - protein, 122 aa, Artificial Sequence; identical to SEQ ID NO: 12467
  Description of Artificial Sequence: Synthetic polypeptide
  VH of XENP018261

SEQ ID NO: 17993 - protein, 5 aa, Artificial Sequence
  Description of Artificial Sequence: Synthetic peptide
  XENP018261 vhCDR1
NYWMN

SEQ ID NO: 17994 - protein, 19 aa, Artificial Sequence
  Description of Artificial Sequence: Synthetic peptide
  XENP018261 vhCDR2
EIRLKSNNYATHYAEPVKG

SEQ ID NO: 17995 - protein, 11 aa, Artificial Sequence
  Description of Artificial Sequence: Synthetic peptide
  XENP018261 vhCDR3
YYGNYGGYFDV

SEQ ID NO: 17996 - protein, 214 aa, Artificial Sequence; identical to SEQ ID NO: 16226
  Description of Artificial Sequence: Synthetic polypeptide
  XENP018261 1G6_H1.160_L1_IgG1_PVA_/S267K Light Chain

SEQ ID NO: 17997 - protein, 107 aa, Artificial Sequence; identical to SEQ ID NO: 10923
  Description of Artificial Sequence: Synthetic polypeptide
  VL of XENP018261

SEQ ID NO: 17998 - protein, 11 aa, Artificial Sequence
  Description of Artificial Sequence: Synthetic peptide
  XENP018261 vlCDR1
RASQSVSNDVA

SEQ ID NO: 17999 - protein, 7 aa, Artificial Sequence
  Description of Artificial Sequence: Synthetic peptide
  XENP018261 vlCDR2
YASHRYT

SEQ ID NO: 18000 - protein, 9 aa, Artificial Sequence
  Description of Artificial Sequence: Synthetic peptide
  XENP018261 vlCDR3
QQDYSSPRT

SEQ ID NO: 18001 - protein, 451 aa, Artificial Sequence
  Description of Artificial Sequence: Synthetic polypeptide
  XENP018262 1G6_H1.161_L1_IgG1_PVA_/S267K Heavy Chain
EVQLVESGGGLVKPGGSLRLSCAASGFTFSNYWMNWVRQAPGKGLEWVGEIRLKSNNYATHYAEPVKGRFTISRDDSKSTVYLQMNSLKTEDTAIYYCTRYYGNYGGYFDVWGAGTLVTVSSASTKGPSVFPLAPSSKSTSGGTAALGCLVKDYFPEPVTVSWNSGALTSGVHTFPAVLQSSGLYSLSSVVTVPSSSLGTQTYICNVNHKPSNTKVDKKVEPKSCDKTHTCPPCPAPPVAGPSVFLFPPKPKDTLMISRTPEVTCVVVDVKHEDPEVKFNWYVDGVEVHNAKTKPREEQYNSTYRVVSVLTVLHQDWLNGKEYKCKVSNKALPAPIEKTISKAKGQPREPQVYTLPPSREEMTKNQVSLTCLVKGFYPSDIAVEWESNGQPENNYKTTPPVLDSDGSFFLYSKLTVDKSRWQQGNVFSCSVMHEALHNHYTQKSLSLSPGK

SEQ ID NO: 18002 - protein, 122 aa, Artificial Sequence; identical to SEQ ID NO: 12476
  Description of Artificial Sequence: Synthetic polypeptide
  VH of XENP018262

SEQ ID NO: 18003 - protein, 5 aa, Artificial Sequence
  Description of Artificial Sequence: Synthetic peptide
  XENP018262 vhCDR1
NYWMN

SEQ ID NO: 18004 - protein, 19 aa, Artificial Sequence
  Description of Artificial Sequence: Synthetic peptide
  XENP018262 vhCDR2
EIRLKSNNYATHYAEPVKG

SEQ ID NO: 18005 - protein, 11 aa, Artificial Sequence
  Description of Artificial Sequence: Synthetic peptide
  XENP018262 vhCDR3
YYGNYGGYFDV

SEQ ID NO: 18006 - protein, 214 aa, Artificial Sequence; identical to SEQ ID NO: 16226
  Description of Artificial Sequence: Synthetic polypeptide
  XENP018262 1G6_H1.161_L1_IgG1_PVA_/S267K Light Chain

SEQ ID NO: 18007 - protein, 107 aa, Artificial Sequence; identical to SEQ ID NO: 10923
  Description of Artificial Sequence: Synthetic polypeptide
  VL of XENP018262

SEQ ID NO: 18008 - protein, 11 aa, Artificial Sequence
  Description of Artificial Sequence: Synthetic peptide
  XENP018262 vlCDR1
RASQSVSNDVA

SEQ ID NO: 18009 - protein, 7 aa, Artificial Sequence
  Description of Artificial Sequence: Synthetic peptide
  XENP018262 vlCDR2
YASHRYT

SEQ ID NO: 18010 - protein, 9 aa, Artificial Sequence
  Description of Artificial Sequence: Synthetic peptide
  XENP018262 vlCDR3
QQDYSSPRT

SEQ ID NO: 18011 - protein, 451 aa, Artificial Sequence
  Description of Artificial Sequence: Synthetic polypeptide
  XENP018263 1G6_H1.162_L1_IgG1_PVA_/S267K Heavy Chain
EVQLVESGGGLVKPGGSLRLSCAASGFTFSNYWMNWVRQAPGKGLEWVGEIRLKSNNYATHYAEPVKGRFTISRDDSKSTVYLQMNSLKTEDTAVYHCTRYYGNYGGYFDVWGAGTLVTVSSASTKGPSVFPLAPSSKSTSGGTAALGCLVKDYFPEPVTVSWNSGALTSGVHTFPAVLQSSGLYSLSSVVTVPSSSLGTQTYICNVNHKPSNTKVDKKVEPKSCDKTHTCPPCPAPPVAGPSVFLFPPKPKDTLMISRTPEVTCVVVDVKHEDPEVKFNWYVDGVEVHNAKTKPREEQYNSTYRVVSVLTVLHQDWLNGKEYKCKVSNKALPAPIEKTISKAKGQPREPQVYTLPPSREEMTKNQVSLTCLVKGFYPSDIAVEWESNGQPENNYKTTPPVLDSDGSFFLYSKLTVDKSRWQQGNVFSCSVMHEALHNHYTQKSLSLSPGK

SEQ ID NO: 18012 - protein, 122 aa, Artificial Sequence; identical to SEQ ID NO: 12485
  Description of Artificial Sequence: Synthetic polypeptide
  VH of XENP018263

SEQ ID NO: 18013 - protein, 5 aa, Artificial Sequence
  Description of Artificial Sequence: Synthetic peptide
  XENP018263 vhCDR1
NYWMN

SEQ ID NO: 18014 - protein, 19 aa, Artificial Sequence
  Description of Artificial Sequence: Synthetic peptide
  XENP018263 vhCDR2
EIRLKSNNYATHYAEPVKG

SEQ ID NO: 18015 - protein, 11 aa, Artificial Sequence
  Description of Artificial Sequence: Synthetic peptide
  XENP018263 vhCDR3
YYGNYGGYFDV

SEQ ID NO: 18016 - protein, 214 aa, Artificial Sequence; identical to SEQ ID NO: 16226
  Description of Artificial Sequence: Synthetic polypeptide
  XENP018263 1G6_H1.162_L1_IgG1_PVA_/S267K Light Chain

SEQ ID NO: 18017 - protein, 107 aa, Artificial Sequence; identical to SEQ ID NO: 10923
  Description of Artificial Sequence: Synthetic polypeptide
  VL of XENP018263

SEQ ID NO: 18018 - protein, 11 aa, Artificial Sequence
  Description of Artificial Sequence: Synthetic peptide
  XENP018263 vlCDR1
RASQSVSNDVA

SEQ ID NO: 18019 - protein, 7 aa, Artificial Sequence
  Description of Artificial Sequence: Synthetic peptide
  XENP018263 vlCDR2
YASHRYT

SEQ ID NO: 18020 - protein, 9 aa, Artificial Sequence
  Description of Artificial Sequence: Synthetic peptide
  XENP018263 vlCDR3
QQDYSSPRT

SEQ ID NO: 18021 - protein, 451 aa, Artificial Sequence
  Description of Artificial Sequence: Synthetic polypeptide
  XENP018264 1G6_H1.163_L1_IgG1_PVA_/S267K Heavy Chain
EVQLVESGGGLVKPGGSLRLSCAASGFTFSNYWMNWVRQAPGKGLEWVGEIRLKSNNYATHYAEPVKGRFTISRDDSKSTVYLQMNSLKTEDTAVYYCARYYGNYGGYFDVWGAGTLVTVSSASTKGPSVFPLAPSSKSTSGGTAALGCLVKDYFPEPVTVSWNSGALTSGVHTFPAVLQSSGLYSLSSVVTVPSSSLGTQTYICNVNHKPSNTKVDKKVEPKSCDKTHTCPPCPAPPVAGPSVFLFPPKPKDTLMISRTPEVTCVVVDVKHEDPEVKFNWYVDGVEVHNAKTKPREEQYNSTYRVVSVLTVLHQDWLNGKEYKCKVSNKALPAPIEKTISKAKGQPREPQVYTLPPSREEMTKNQVSLTCLVKGFYPSDIAVEWESNGQPENNYKTTPPVLDSDGSFFLYSKLTVDKSRWQQGNVFSCSVMHEALHNHYTQKSLSLSPGK

SEQ ID NO: 18022 - protein, 122 aa, Artificial Sequence; identical to SEQ ID NO: 12494
  Description of Artificial Sequence: Synthetic polypeptide
  VH of XENP018264

SEQ ID NO: 18023 - protein, 5 aa, Artificial Sequence
  Description of Artificial Sequence: Synthetic peptide
  XENP018264 vhCDR1
NYWMN

SEQ ID NO: 18024 - protein, 19 aa, Artificial Sequence
  Description of Artificial Sequence: Synthetic peptide
  XENP018264 vhCDR2
EIRLKSNNYATHYAEPVKG

SEQ ID NO: 18025 - protein, 11 aa, Artificial Sequence
  Description of Artificial Sequence: Synthetic peptide
  XENP018264 vhCDR3
YYGNYGGYFDV

SEQ ID NO: 18026 - protein, 214 aa, Artificial Sequence; identical to SEQ ID NO: 16226
  Description of Artificial Sequence: Synthetic polypeptide
  XENP018264 1G6_H1.163_L1_IgG1_PVA_/S267K Light Chain

SEQ ID NO: 18027 - protein, 107 aa, Artificial Sequence; identical to SEQ ID NO: 10923
  Description of Artificial Sequence: Synthetic polypeptide
  VL of XENP018264

SEQ ID NO: 18028 - protein, 11 aa, Artificial Sequence
  Description of Artificial Sequence: Synthetic peptide
  XENP018264 vlCDR1
RASQSVSNDVA

SEQ ID NO: 18029 - protein, 7 aa, Artificial Sequence
  Description of Artificial Sequence: Synthetic peptide
  XENP018264 vlCDR2
YASHRYT

SEQ ID NO: 18030 - protein, 9 aa, Artificial Sequence
  Description of Artificial Sequence: Synthetic peptide
  XENP018264 vlCDR3
QQDYSSPRT

SEQ ID NO: 18031 - protein, 451 aa, Artificial Sequence
  Description of Artificial Sequence: Synthetic polypeptide
  XENP018265 1G6_H1.164_L1_IgG1_PVA_/S267K Heavy Chain
EVQLVESGGGLVKPGGSLRLSCAASGFTFSNYWMNWVRQAPGKGLEWVGEIRLKSNNYATHYAEPVKGRFTISRDDSKSTVYLQMNSLKTEDTAVYYCVRYYGNYGGYFDVWGAGTLVTVSSASTKGPSVFPLAPSSKSTSGGTAALGCLVKDYFPEPVTVSWNSGALTSGVHTFPAVLQSSGLYSLSSVVTVPSSSLGTQTYICNVNHKPSNTKVDKKVEPKSCDKTHTCPPCPAPPVAGPSVFLFPPKPKDTLMISRTPEVTCVVVDVKHEDPEVKFNWYVDGVEVHNAKTKPREEQYNSTYRVVSVLTVLHQDWLNGKEYKCKVSNKALPAPIEKTISKAKGQPREPQVYTLPPSREEMTKNQVSLTCLVKGFYPSDIAVEWESNGQPENNYKTTPPVLDSDGSFFLYSKLTVDKSRWQQGNVFSCSVMHEALHNHYTQKSLSLSPGK

SEQ ID NO: 18032 - protein, 122 aa, Artificial Sequence; identical to SEQ ID NO: 12503
  Description of Artificial Sequence: Synthetic polypeptide
  VH of XENP018265

SEQ ID NO: 18033 - protein, 5 aa, Artificial Sequence
  Description of Artificial Sequence: Synthetic peptide
  XENP018265 vhCDR1
NYWMN

SEQ ID NO: 18034 - protein, 19 aa, Artificial Sequence
  Description of Artificial Sequence: Synthetic peptide
  XENP018265 vhCDR2
EIRLKSNNYATHYAEPVKG

SEQ ID NO: 18035 - protein, 11 aa, Artificial Sequence
  Description of Artificial Sequence: Synthetic peptide
  XENP018265 vhCDR3
YYGNYGGYFDV

SEQ ID NO: 18036 - protein, 214 aa, Artificial Sequence; identical to SEQ ID NO: 16226
  Description of Artificial Sequence: Synthetic polypeptide
  XENP018265 1G6_H1.164_L1_IgG1_PVA_/S267K Light Chain

SEQ ID NO: 18037 - protein, 107 aa, Artificial Sequence; identical to SEQ ID NO: 10923
  Description of Artificial Sequence: Synthetic polypeptide
  VL of XENP018265

SEQ ID NO: 18038 - protein, 11 aa, Artificial Sequence
  Description of Artificial Sequence: Synthetic peptide
  XENP018265 vlCDR1
RASQSVSNDVA

SEQ ID NO: 18039 - protein, 7 aa, Artificial Sequence
  Description of Artificial Sequence: Synthetic peptide
  XENP018265 vlCDR2
YASHRYT

SEQ ID NO: 18040 - protein, 9 aa, Artificial Sequence
  Description of Artificial Sequence: Synthetic peptide
  XENP018265 vlCDR3
QQDYSSPRT

SEQ ID NO: 18041 - protein, 451 aa, Artificial Sequence
  Description of Artificial Sequence: Synthetic polypeptide
  XENP018266 1G6_H1.165_L1_IgG1_PVA_/S267K Heavy Chain
EVQLVESGGGLVKPGGSLRLSCAASGFTFSNYWMNWVRQAPGKGLEWVGEIRLKSNNYATHYAEPVKGRFTISRDDSKSTVYLQMNSLKTEDTAVYYCTTYYGNYGGYFDVWGAGTLVTVSSASTKGPSVFPLAPSSKSTSGGTAALGCLVKDYFPEPVTVSWNSGALTSGVHTFPAVLQSSGLYSLSSVVTVPSSSLGTQTYICNVNHKPSNTKVDKKVEPKSCDKTHTCPPCPAPPVAGPSVFLFPPKPKDTLMISRTPEVTCVVVDVKHEDPEVKFNWYVDGVEVHNAKTKPREEQYNSTYRVVSVLTVLHQDWLNGKEYKCKVSNKALPAPIEKTISKAKGQPREPQVYTLPPSREEMTKNQVSLTCLVKGFYPSDIAVEWESNGQPENNYKTTPPVLDSDGSFFLYSKLTVDKSRWQQGNVFSCSVMHEALHNHYTQKSLSLSPGK

SEQ ID NO: 18042 - protein, 122 aa, Artificial Sequence; identical to SEQ ID NO: 12512
  Description of Artificial Sequence: Synthetic polypeptide
  VH of XENP018266

SEQ ID NO: 18043 - protein, 5 aa, Artificial Sequence
  Description of Artificial Sequence: Synthetic peptide
  XENP018266 vhCDR1
NYWMN

SEQ ID NO: 18044 - protein, 19 aa, Artificial Sequence
  Description of Artificial Sequence: Synthetic peptide
  XENP018266 vhCDR2
EIRLKSNNYATHYAEPVKG

SEQ ID NO: 18045 - protein, 11 aa, Artificial Sequence
  Description of Artificial Sequence: Synthetic peptide
  XENP018266 vhCDR3
YYGNYGGYFDV

SEQ ID NO: 18046 - protein, 214 aa, Artificial Sequence; identical to SEQ ID NO: 16226
  Description of Artificial Sequence: Synthetic polypeptide
  XENP018266 1G6_H1.165_L1_IgG1_PVA_/S267K Light Chain

SEQ ID NO: 18047 - protein, 107 aa, Artificial Sequence; identical to SEQ ID NO: 10923
  Description of Artificial Sequence: Synthetic polypeptide
  VL of XENP018266

SEQ ID NO: 18048 - protein, 11 aa, Artificial Sequence
  Description of Artificial Sequence: Synthetic peptide
  XENP018266 vlCDR1
RASQSVSNDVA

SEQ ID NO: 18049 - protein, 7 aa, Artificial Sequence
  Description of Artificial Sequence: Synthetic peptide
  XENP018266 vlCDR2
YASHRYT

SEQ ID NO: 18050 - protein, 9 aa, Artificial Sequence
  Description of Artificial Sequence: Synthetic peptide
  XENP018266 vlCDR3
QQDYSSPRT

SEQ ID NO: 18051 - protein, 451 aa, Artificial Sequence
  Description of Artificial Sequence: Synthetic polypeptide
  XENP018267 1G6_H1.166_L1_IgG1_PVA_/S267K Heavy Chain
EVQLVESGGGLVKPGGSLRLSCAASGFTFSNYWMNWVRQAPGKGLEWVGEIRLKSNNYATHYAEPVKGRFTISRDDSKSTVYLQMNSLKTEDTAVYYCTKYYGNYGGYFDVWGAGTLVTVSSASTKGPSVFPLAPSSKSTSGGTAALGCLVKDYFPEPVTVSWNSGALTSGVHTFPAVLQSSGLYSLSSVVTVPSSSLGTQTYICNVNHKPSNTKVDKKVEPKSCDKTHTCPPCPAPPVAGPSVFLFPPKPKDTLMISRTPEVTCVVVDVKHEDPEVKFNWYVDGVEVHNAKTKPREEQYNSTYRVVSVLTVLHQDWLNGKEYKCKVSNKALPAPIEKTISKAKGQPREPQVYTLPPSREEMTKNQVSLTCLVKGFYPSDIAVEWESNGQPENNYKTTPPVLDSDGSFFLYSKLTVDKSRWQQGNVFSCSVMHEALHNHYTQKSLSLSPGK

SEQ ID NO: 18052 - protein, 122 aa, Artificial Sequence; identical to SEQ ID NO: 12521
  Description of Artificial Sequence: Synthetic polypeptide
  VH of XENP018267

SEQ ID NO: 18053 - protein, 5 aa, Artificial Sequence
  Description of Artificial Sequence: Synthetic peptide
  XENP018267 vhCDR1
NYWMN

SEQ ID NO: 18054 - protein, 19 aa, Artificial Sequence
  Description of Artificial Sequence: Synthetic peptide
  XENP018267 vhCDR2
EIRLKSNNYATHYAEPVKG

SEQ ID NO: 18055 - protein, 11 aa, Artificial Sequence
  Description of Artificial Sequence: Synthetic peptide
  XENP018267 vhCDR3
YYGNYGGYFDV

SEQ ID NO: 18056 - protein, 214 aa, Artificial Sequence; identical to SEQ ID NO: 16226
  Description of Artificial Sequence: Synthetic polypeptide
  XENP018267 1G6_H1.166_L1_IgG1_PVA_/S267K Light Chain

SEQ ID NO: 18057 - protein, 107 aa, Artificial Sequence; identical to SEQ ID NO: 10923
  Description of Artificial Sequence: Synthetic polypeptide
  VL of XENP018267

SEQ ID NO: 18058 - protein, 11 aa, Artificial Sequence
  Description of Artificial Sequence: Synthetic peptide
  XENP018267 vlCDR1
RASQSVSNDVA

SEQ ID NO: 18059 - protein, 7 aa, Artificial Sequence
  Description of Artificial Sequence: Synthetic peptide
  XENP018267 vlCDR2
YASHRYT

SEQ ID NO: 18060 - protein, 9 aa, Artificial Sequence
  Description of Artificial Sequence: Synthetic peptide
  XENP018267 vlCDR3
QQDYSSPRT

SEQ ID NO: 18061 - protein, 451 aa, Artificial Sequence
  Description of Artificial Sequence: Synthetic polypeptide
  XENP018268 1G6_H1.167_L1_IgG1_PVA_/S267K Heavy Chain
EVQLVESGGGLVKPGGSLRLSCAASGFTFSNYWMNWVRQAPGKGLEWVGEIRLKSNNYATHYAEPVKGRFTISRDDSKSTVYLQMNSLKTEDTAVYYCTRFYGNYGGYFDVWGAGTLVTVSSASTKGPSVFPLAPSSKSTSGGTAALGCLVKDYFPEPVTVSWNSGALTSGVHTFPAVLQSSGLYSLSSVVTVPSSSLGTQTYICNVNHKPSNTKVDKKVEPKSCDKTHTCPPCPAPPVAGPSVFLFPPKPKDTLMISRTPEVTCVVVDVKHEDPEVKFNWYVDGVEVHNAKTKPREEQYNSTYRVVSVLTVLHQDWLNGKEYKCKVSNKALPAPIEKTISKAKGQPREPQVYTLPPSREEMTKNQVSLTCLVKGFYPSDIAVEWESNGQPENNYKTTPPVLDSDGSFFLYSKLTVDKSRWQQGNVFSCSVMHEALHNHYTQKSLSLSPGK

SEQ ID NO: 18062 - protein, 122 aa, Artificial Sequence; identical to SEQ ID NO: 12530
  Description of Artificial Sequence: Synthetic polypeptide
  VH of XENP018268

SEQ ID NO: 18063 - protein, 5 aa, Artificial Sequence
  Description of Artificial Sequence: Synthetic peptide
  XENP018268 vhCDR1
NYWMN

SEQ ID NO: 18064 - protein, 19 aa, Artificial Sequence
  Description of Artificial Sequence: Synthetic peptide
  XENP018268 vhCDR2
EIRLKSNNYATHYAEPVKG

SEQ ID NO: 18065 - protein, 11 aa, Artificial Sequence
  Description of Artificial Sequence: Synthetic peptide
  XENP018268 vhCDR3
FYGNYGGYFDV

SEQ ID NO: 18066 - protein, 214 aa, Artificial Sequence; identical to SEQ ID NO: 16226
  Description of Artificial Sequence: Synthetic polypeptide
  XENP018268 1G6_H1.167_L1_IgG1_PVA_/S267K Light Chain

SEQ ID NO: 18067 - protein, 107 aa, Artificial Sequence; identical to SEQ ID NO: 10923
  Description of Artificial Sequence: Synthetic polypeptide
  VL of XENP018268

SEQ ID NO: 18068 - protein, 11 aa, Artificial Sequence
  Description of Artificial Sequence: Synthetic peptide
  XENP018268 vlCDR1
RASQSVSNDVA

SEQ ID NO: 18069 - protein, 7 aa, Artificial Sequence
  Description of Artificial Sequence: Synthetic peptide
  XENP018268 vlCDR2
YASHRYT

SEQ ID NO: 18070 - protein, 9 aa, Artificial Sequence
  Description of Artificial Sequence: Synthetic peptide
  XENP018268 vlCDR3
QQDYSSPRT

SEQ ID NO: 18071 - protein, 451 aa, Artificial Sequence
  Description of Artificial Sequence: Synthetic polypeptide
  XENP018269 1G6_H1.168_L1_IgG1_PVA_/S267K Heavy Chain
EVQLVESGGGLVKPGGSLRLSCAASGFTFSNYWMNWVRQAPGKGLEWVGEIRLKSNNYATHYAEPVKGRFTISRDDSKSTVYLQMNSLKTEDTAVYYCTRHYGNYGGYFDVWGAGTLVTVSSASTKGPSVFPLAPSSKSTSGGTAALGCLVKDYFPEPVTVSWNSGALTSGVHTFPAVLQSSGLYSLSSVVTVPSSSLGTQTYICNVNHKPSNTKVDKKVEPKSCDKTHTCPPCPAPPVAGPSVFLFPPKPKDTLMISRTPEVTCVVVDVKHEDPEVKFNWYVDGVEVHNAKTKPREEQYNSTYRVVSVLTVLHQDWLNGKEYKCKVSNKALPAPIEKTISKAKGQPREPQVYTLPPSREEMTKNQVSLTCLVKGFYPSDIAVEWESNGQPENNYKTTPPVLDSDGSFFLYSKLTVDKSRWQQGNVFSCSVMHEALHNHYTQKSLSLSPGK

SEQ ID NO: 18072 - protein, 122 aa, Artificial Sequence; identical to SEQ ID NO: 12539
  Description of Artificial Sequence: Synthetic polypeptide
  VH of XENP018269

SEQ ID NO: 18073 - protein, 5 aa, Artificial Sequence
  Description of Artificial Sequence: Synthetic peptide
  XENP018269 vhCDR1
NYWMN

SEQ ID NO: 18074 - protein, 19 aa, Artificial Sequence
  Description of Artificial Sequence: Synthetic peptide
  XENP018269 vhCDR2
EIRLKSNNYATHYAEPVKG

SEQ ID NO: 18075 - protein, 11 aa, Artificial Sequence
  Description of Artificial Sequence: Synthetic peptide
  XENP018269 vhCDR3
HYGNYGGYFDV

SEQ ID NO: 18076 - protein, 214 aa, Artificial Sequence; identical to SEQ ID NO: 16226
  Description of Artificial Sequence: Synthetic polypeptide
  XENP018269 1G6_H1.168_L1_IgG1_PVA_/S267K Light Chain

SEQ ID NO: 18077 - protein, 107 aa, Artificial Sequence; identical to SEQ ID NO: 10923
  Description of Artificial Sequence: Synthetic polypeptide
  VL of XENP018269

SEQ ID NO: 18078 - protein, 11 aa, Artificial Sequence
  Description of Artificial Sequence: Synthetic peptide
  XENP018269 vlCDR1
RASQSVSNDVA

SEQ ID NO: 18079 - protein, 7 aa, Artificial Sequence
  Description of Artificial Sequence: Synthetic peptide
  XENP018269 vlCDR2
YASHRYT

SEQ ID NO: 18080 - protein, 9 aa, Artificial Sequence
  Description of Artificial Sequence: Synthetic peptide
  XENP018269 vlCDR3
QQDYSSPRT

SEQ ID NO: 18081 - protein, 451 aa, Artificial Sequence
  Description of Artificial Sequence: Synthetic polypeptide
  XENP018270 1G6_H1.169_L1_IgG1_PVA_/S267K Heavy Chain
EVQLVESGGGLVKPGGSLRLSCAASGFTFSNYWMNWVRQAPGKGLEWVGEIRLKSNNYATHYAEPVKGRFTISRDDSKSTVYLQMNSLKTEDTAVYYCTRLYGNYGGYFDVWGAGTLVTVSSASTKGPSVFPLAPSSKSTSGGTAALGCLVKDYFPEPVTVSWNSGALTSGVHTFPAVLQSSGLYSLSSVVTVPSSSLGTQTYICNVNHKPSNTKVDKKVEPKSCDKTHTCPPCPAPPVAGPSVFLFPPKPKDTLMISRTPEVTCVVVDVKHEDPEVKFNWYVDGVEVHNAKTKPREEQYNSTYRVVSVLTVLHQDWLNGKEYKCKVSNKALPAPIEKTISKAKGQPREPQVYTLPPSREEMTKNQVSLTCLVKGFYPSDIAVEWESNGQPENNYKTTPPVLDSDGSFFLYSKLTVDKSRWQQGNVFSCSVMHEALHNHYTQKSLSLSPGK

SEQ ID NO: 18082 - protein, 122 aa, Artificial Sequence; identical to SEQ ID NO: 12548
  Description of Artificial Sequence: Synthetic polypeptide
  VH of XENP018270

SEQ ID NO: 18083 - protein, 5 aa, Artificial Sequence
  Description of Artificial Sequence: Synthetic peptide
  XENP018270 vhCDR1
NYWMN

SEQ ID NO: 18084 - protein, 19 aa, Artificial Sequence
  Description of Artificial Sequence: Synthetic peptide
  XENP018270 vhCDR2
EIRLKSNNYATHYAEPVKG

SEQ ID NO: 18085 - protein, 11 aa, Artificial Sequence
  Description of Artificial Sequence: Synthetic peptide
  XENP018270 vhCDR3
LYGNYGGYFDV

SEQ ID NO: 18086 - protein, 214 aa, Artificial Sequence; identical to SEQ ID NO: 16226
  Description of Artificial Sequence: Synthetic polypeptide
  XENP018270 1G6_H1.169_L1_IgG1_PVA_/S267K Light Chain

SEQ ID NO: 18087 - protein, 107 aa, Artificial Sequence; identical to SEQ ID NO: 10923
  Description of Artificial Sequence: Synthetic polypeptide
  VL of XENP018270

SEQ ID NO: 18088 - protein, 11 aa, Artificial Sequence
  Description of Artificial Sequence: Synthetic peptide
  XENP018270 vlCDR1
RASQSVSNDVA

SEQ ID NO: 18089 - protein, 7 aa, Artificial Sequence
  Description of Artificial Sequence: Synthetic peptide
  XENP018270 vlCDR2
YASHRYT

SEQ ID NO: 18090 - protein, 9 aa, Artificial Sequence
  Description of Artificial Sequence: Synthetic peptide
  XENP018270 vlCDR3
QQDYSSPRT

SEQ ID NO: 18091 - protein, 451 aa, Artificial Sequence
  Description of Artificial Sequence: Synthetic polypeptide
  XENP018271 1G6_H1.170_L1_IgG1_PVA_/S267K Heavy Chain
EVQLVESGGGLVKPGGSLRLSCAASGFTFSNYWMNWVRQAPGKGLEWVGEIRLKSNNYATHYAEPVKGRFTISRDDSKSTVYLQMNSLKTEDTAVYYCTRWYGNYGGYFDVWGAGTLVTVSSASTKGPSVFPLAPSSKSTSGGTAALGCLVKDYFPEPVTVSWNSGALTSGVHTFPAVLQSSGLYSLSSVVTVPSSSLGTQTYICNVNHKPSNTKVDKKVEPKSCDKTHTCPPCPAPPVAGPSVFLFPPKPKDTLMISRTPEVTCVVVDVKHEDPEVKFNWYVDGVEVHNAKTKPREEQYNSTYRVVSVLTVLHQDWLNGKEYKCKVSNKALPAPIEKTISKAKGQPREPQVYTLPPSREEMTKNQVSLTCLVKGFYPSDIAVEWESNGQPENNYKTTPPVLDSDGSFFLYSKLTVDKSRWQQGNVFSCSVMHEALHNHYTQKSLSLSPGK

SEQ ID NO: 18092 - protein, 122 aa, Artificial Sequence; identical to SEQ ID NO: 12557
  Description of Artificial Sequence: Synthetic polypeptide
  VH of XENP018271

SEQ ID NO: 18093 - protein, 5 aa, Artificial Sequence
  Description of Artificial Sequence: Synthetic peptide
  XENP018271 vhCDR1
NYWMN

SEQ ID NO: 18094 - protein, 19 aa, Artificial Sequence
  Description of Artificial Sequence: Synthetic peptide
  XENP018271 vhCDR2
EIRLKSNNYATHYAEPVKG

SEQ ID NO: 18095 - protein, 11 aa, Artificial Sequence
  Description of Artificial Sequence: Synthetic peptide
  XENP018271 vhCDR3
WYGNYGGYFDV

SEQ ID NO: 18096 - protein, 214 aa, Artificial Sequence; identical to SEQ ID NO: 16226
  Description of Artificial Sequence: Synthetic polypeptide
  XENP018271 1G6_H1.170_L1_IgG1_PVA_/S267K Light Chain

SEQ ID NO: 18097 - protein, 107 aa, Artificial Sequence; identical to SEQ ID NO: 10923
  Description of Artificial Sequence: Synthetic polypeptide
  VL of XENP018271

SEQ ID NO: 18098 - protein, 11 aa, Artificial Sequence
  Description of Artificial Sequence: Synthetic peptide
  XENP018271 vlCDR1
RASQSVSNDVA

SEQ ID NO: 18099 - protein, 7 aa, Artificial Sequence
  Description of Artificial Sequence: Synthetic peptide
  XENP018271 vlCDR2
YASHRYT

SEQ ID NO: 18100 - protein, 9 aa, Artificial Sequence
  Description of Artificial Sequence: Synthetic peptide
  XENP018271 vlCDR3
QQDYSSPRT

SEQ ID NO: 18101 - protein, 451 aa, Artificial Sequence
  Description of Artificial Sequence: Synthetic polypeptide
  XENP018272 1G6_H1.171_L1_IgG1_PVA_/S267K Heavy Chain
EVQLVESGGGLVKPGGSLRLSCAASGFTFSNYWMNWVRQAPGKGLEWVGEIRLKSNNYATHYAEPVKGRFTISRDDSKSTVYLQMNSLKTEDTAVYYCTRVYGNYGGYFDVWGAGTLVTVSSASTKGPSVFPLAPSSKSTSGGTAALGCLVKDYFPEPVTVSWNSGALTSGVHTFPAVLQSSGLYSLSSVVTVPSSSLGTQTYICNVNHKPSNTKVDKKVEPKSCDKTHTCPPCPAPPVAGPSVFLFPPKPKDTLMISRTPEVTCVVVDVKHEDPEVKFNWYVDGVEVHNAKTKPREEQYNSTYRVVSVLTVLHQDWLNGKEYKCKVSNKALPAPIEKTISKAKGQPREPQVYTLPPSREEMTKNQVSLTCLVKGFYPSDIAVEWESNGQPENNYKTTPPVLDSDGSFFLYSKLTVDKSRWQQGNVFSCSVMHEALHNHYTQKSLSLSPGK

SEQ ID NO: 18102 - protein, 122 aa, Artificial Sequence; identical to SEQ ID NO: 12566
  Description of Artificial Sequence: Synthetic polypeptide
  VH of XENP018272

SEQ ID NO: 18103 - protein, 5 aa, Artificial Sequence
  Description of Artificial Sequence: Synthetic peptide
  XENP018272 vhCDR1
NYWMN

SEQ ID NO: 18104 - protein, 19 aa, Artificial Sequence
  Description of Artificial Sequence: Synthetic peptide
  XENP018272 vhCDR2
EIRLKSNNYATHYAEPVKG

SEQ ID NO: 18105 - protein, 11 aa, Artificial Sequence
  Description of Artificial Sequence: Synthetic peptide
  XENP018272 vhCDR3
VYGNYGGYFDV

SEQ ID NO: 18106 - protein, 214 aa, Artificial Sequence; identical to SEQ ID NO: 16226
  Description of Artificial Sequence: Synthetic polypeptide
  XENP018272 1G6_H1.171_L1_IgG1_PVA_/S267K Light Chain

SEQ ID NO: 18107 - protein, 107 aa, Artificial Sequence; identical to SEQ ID NO: 10923
  Description of Artificial Sequence: Synthetic polypeptide
  VL of XENP018272

SEQ ID NO: 18108 - protein, 11 aa, Artificial Sequence
  Description of Artificial Sequence: Synthetic peptide
  XENP018272 vlCDR1
RASQSVSNDVA

SEQ ID NO: 18109 - protein, 7 aa, Artificial Sequence
  Description of Artificial Sequence: Synthetic peptide
  XENP018272 vlCDR2
YASHRYT

SEQ ID NO: 18110 - protein, 9 aa, Artificial Sequence
  Description of Artificial Sequence: Synthetic peptide
  XENP018272 vlCDR3
QQDYSSPRT

SEQ ID NO: 18111 - protein, 451 aa, Artificial Sequence
  Description of Artificial Sequence: Synthetic polypeptide
  XENP018273 1G6_H1.172_L1_IgG1_PVA_/S267K Heavy Chain
EVQLVESGGGLVKPGGSLRLSCAASGFTFSNYWMNWVRQAPGKGLEWVGEIRLKSNNYATHYAEPVKGRFTISRDDSKSTVYLQMNSLKTEDTAVYYCTRAYGNYGGYFDVWGAGTLVTVSSASTKGPSVFPLAPSSKSTSGGTAALGCLVKDYFPEPVTVSWNSGALTSGVHTFPAVLQSSGLYSLSSVVTVPSSSLGTQTYICNVNHKPSNTKVDKKVEPKSCDKTHTCPPCPAPPVAGPSVFLFPPKPKDTLMISRTPEVTCVVVDVKHEDPEVKFNWYVDGVEVHNAKTKPREEQYNSTYRVVSVLTVLHQDWLNGKEYKCKVSNKALPAPIEKTISKAKGQPREPQVYTLPPSREEMTKNQVSLTCLVKGFYPSDIAVEWESNGQPENNYKTTPPVLDSDGSFFLYSKLTVDKSRWQQGNVFSCSVMHEALHNHYTQKSLSLSPGK

SEQ ID NO: 18112 - protein, 122 aa, Artificial Sequence; identical to SEQ ID NO: 12575
  Description of Artificial Sequence: Synthetic polypeptide
  VH of XENP018273

SEQ ID NO: 18113 - protein, 5 aa, Artificial Sequence
  Description of Artificial Sequence: Synthetic peptide
  XENP018273 vhCDR1
NYWMN

SEQ ID NO: 18114 - protein, 19 aa, Artificial Sequence
  Description of Artificial Sequence: Synthetic peptide
  XENP018273 vhCDR2
EIRLKSNNYATHYAEPVKG

SEQ ID NO: 18115 - protein, 11 aa, Artificial Sequence
  Description of Artificial Sequence: Synthetic peptide
  XENP018273 vhCDR3
AYGNYGGYFDV

SEQ ID NO: 18116 - protein, 214 aa, Artificial Sequence; identical to SEQ ID NO: 16226
  Description of Artificial Sequence: Synthetic polypeptide
  XENP018273 1G6_H1.172_L1_IgG1_PVA_/S267K Light Chain

SEQ ID NO: 18117 - protein, 107 aa, Artificial Sequence; identical to SEQ ID NO: 10923
  Description of Artificial Sequence: Synthetic polypeptide
  VL of XENP018273

SEQ ID NO: 18118 - protein, 11 aa, Artificial Sequence
  Description of Artificial Sequence: Synthetic peptide
  XENP018273 vlCDR1
RASQSVSNDVA

SEQ ID NO: 18119 - protein, 7 aa, Artificial Sequence
  Description of Artificial Sequence: Synthetic peptide
  XENP018273 vlCDR2
YASHRYT

SEQ ID NO: 18120 - protein, 9 aa, Artificial Sequence
  Description of Artificial Sequence: Synthetic peptide
  XENP018273 vlCDR3
QQDYSSPRT

SEQ ID NO: 18121 - protein, 451 aa, Artificial Sequence
  Description of Artificial Sequence: Synthetic polypeptide
  XENP018274 1G6_H1.173_L1_IgG1_PVA_/S267K Heavy Chain
EVQLVESGGGLVKPGGSLRLSCAASGFTFSNYWMNWVRQAPGKGLEWVGEIRLKSNNYATHYAEPVKGRFTISRDDSKSTVYLQMNSLKTEDTAVYYCTRQYGNYGGYFDVWGAGTLVTVSSASTKGPSVFPLAPSSKSTSGGTAALGCLVKDYFPEPVTVSWNSGALTSGVHTFPAVLQSSGLYSLSSVVTVPSSSLGTQTYICNVNHKPSNTKVDKKVEPKSCDKTHTCPPCPAPPVAGPSVFLFPPKPKDTLMISRTPEVTCVVVDVKHEDPEVKFNWYVDGVEVHNAKTKPREEQYNSTYRVVSVLTVLHQDWLNGKEYKCKVSNKALPAPIEKTISKAKGQPREPQVYTLPPSREEMTKNQVSLTCLVKGFYPSDIAVEWESNGQPENNYKTTPPVLDSDGSFFLYSKLTVDKSRWQQGNVFSCSVMHEALHNHYTQKSLSLSPGK

SEQ ID NO: 18122 - protein, 122 aa, Artificial Sequence; identical to SEQ ID NO: 12584
  Description of Artificial Sequence: Synthetic polypeptide
  VH of XENP018274

SEQ ID NO: 18123 - protein, 5 aa, Artificial Sequence
  Description of Artificial Sequence: Synthetic peptide
  XENP018274 vhCDR1
NYWMN

SEQ ID NO: 18124 - protein, 19 aa, Artificial Sequence
  Description of Artificial Sequence: Synthetic peptide
  XENP018274 vhCDR2
EIRLKSNNYATHYAEPVKG

SEQ ID NO: 18125 - protein, 11 aa, Artificial Sequence
  Description of Artificial Sequence: Synthetic peptide
  XENP018274 vhCDR3
QYGNYGGYFDV

SEQ ID NO: 18126 - protein, 214 aa, Artificial Sequence; identical to SEQ ID NO: 16226
  Description of Artificial Sequence: Synthetic polypeptide
  XENP018274 1G6_H1.173_L1_IgG1_PVA_/S267K Light Chain

SEQ ID NO: 18127 - protein, 107 aa, Artificial Sequence; identical to SEQ ID NO: 10923
  Description of Artificial Sequence: Synthetic polypeptide
  VL of XENP018274

SEQ ID NO: 18128 - protein, 11 aa, Artificial Sequence
  Description of Artificial Sequence: Synthetic peptide
  XENP018274 vlCDR1
RASQSVSNDVA

SEQ ID NO: 18129 - protein, 7 aa, Artificial Sequence
  Description of Artificial Sequence: Synthetic peptide
  XENP018274 vlCDR2
YASHRYT

SEQ ID NO: 18130 - protein, 9 aa, Artificial Sequence
  Description of Artificial Sequence: Synthetic peptide
  XENP018274 vlCDR3
QQDYSSPRT

SEQ ID NO: 18131 - protein, 451 aa, Artificial Sequence
  Description of Artificial Sequence: Synthetic polypeptide
  XENP018275 1G6_H1.174_L1_IgG1_PVA_/S267K Heavy Chain
EVQLVESGGGLVKPGGSLRLSCAASGFTFSNYWMNWVRQAPGKGLEWVGEIRLKSNNYATHYAEPVKGRFTISRDDSKSTVYLQMNSLKTEDTAVYYCTRDYGNYGGYFDVWGAGTLVTVSSASTKGPSVFPLAPSSKSTSGGTAALGCLVKDYFPEPVTVSWNSGALTSGVHTFPAVLQSSGLYSLSSVVTVPSSSLGTQTYICNVNHKPSNTKVDKKVEPKSCDKTHTCPPCPAPPVAGPSVFLFPPKPKDTLMISRTPEVTCVVVDVKHEDPEVKFNWYVDGVEVHNAKTKPREEQYNSTYRVVSVLTVLHQDWLNGKEYKCKVSNKALPAPIEKTISKAKGQPREPQVYTLPPSREEMTKNQVSLTCLVKGFYPSDIAVEWESNGQPENNYKTTPPVLDSDGSFFLYSKLTVDKSRWQQGNVFSCSVMHEALHNHYTQKSLSLSPGK

SEQ ID NO: 18132 - protein, 122 aa, Artificial Sequence; identical to SEQ ID NO: 12593
  Description of Artificial Sequence: Synthetic polypeptide
  VH of XENP018275

SEQ ID NO: 18133 - protein, 5 aa, Artificial Sequence
  Description of Artificial Sequence: Synthetic peptide
  XENP018275 vhCDR1
NYWMN

SEQ ID NO: 18134 - protein, 19 aa, Artificial Sequence
  Description of Artificial Sequence: Synthetic peptide
  XENP018275 vhCDR2
EIRLKSNNYATHYAEPVKG

SEQ ID NO: 18135 - protein, 11 aa, Artificial Sequence
  Description of Artificial Sequence: Synthetic peptide
  XENP018275 vhCDR3
DYGNYGGYFDV

SEQ ID NO: 18136 - protein, 214 aa, Artificial Sequence; identical to SEQ ID NO: 16226
  Description of Artificial Sequence: Synthetic polypeptide
  XENP018275 1G6_H1.174_L1_IgG1_PVA_/S267K Light Chain

SEQ ID NO: 18137 - protein, 107 aa, Artificial Sequence; identical to SEQ ID NO: 10923
  Description of Artificial Sequence: Synthetic polypeptide
  VL of XENP018275

SEQ ID NO: 18138 - protein, 11 aa, Artificial Sequence
  Description of Artificial Sequence: Synthetic peptide
  XENP018275 vlCDR1
RASQSVSNDVA

SEQ ID NO: 18139 - protein, 7 aa, Artificial Sequence
  Description of Artificial Sequence: Synthetic peptide
  XENP018275 vlCDR2
YASHRYT

SEQ ID NO: 18140 - protein, 9 aa, Artificial Sequence
  Description of Artificial Sequence: Synthetic peptide
  XENP018275 vlCDR3
QQDYSSPRT

SEQ ID NO: 18141 - protein, 451 aa, Artificial Sequence
  Description of Artificial Sequence: Synthetic polypeptide
  XENP018276 1G6_H1.175_L1_IgG1_PVA_/S267K Heavy Chain
EVQLVESGGGLVKPGGSLRLSCAASGFTFSNYWMNWVRQAPGKGLEWVGEIRLKSNNYATHYAEPVKGRFTISRDDSKSTVYLQMNSLKTEDTAVYYCTRKYGNYGGYFDVWGAGTLVTVSSASTKGPSVFPLAPSSKSTSGGTAALGCLVKDYFPEPVTVSWNSGALTSGVHTFPAVLQSSGLYSLSSVVTVPSSSLGTQTYICNVNHKPSNTKVDKKVEPKSCDKTHTCPPCPAPPVAGPSVFLFPPKPKDTLMISRTPEVTCVVVDVKHEDPEVKFNWYVDGVEVHNAKTKPREEQYNSTYRVVSVLTVLHQDWLNGKEYKCKVSNKALPAPIEKTISKAKGQPREPQVYTLPPSREEMTKNQVSLTCLVKGFYPSDIAVEWESNGQPENNYKTTPPVLDSDGSFFLYSKLTVDKSRWQQGNVFSCSVMHEALHNHYTQKSLSLSPGK

SEQ ID NO: 18142 - protein, 122 aa, Artificial Sequence; identical to SEQ ID NO: 12602
  Description of Artificial Sequence: Synthetic polypeptide
  VH of XENP018276

SEQ ID NO: 18143 - protein, 5 aa, Artificial Sequence
  Description of Artificial Sequence: Synthetic peptide
  XENP018276 vhCDR1
NYWMN

SEQ ID NO: 18144 - protein, 19 aa, Artificial Sequence
  Description of Artificial Sequence: Synthetic peptide
  XENP018276 vhCDR2
EIRLKSNNYATHYAEPVKG

SEQ ID NO: 18145 - protein, 11 aa, Artificial Sequence
  Description of Artificial Sequence: Synthetic peptide
  XENP018276 vhCDR3
KYGNYGGYFDV

SEQ ID NO: 18146 - protein, 214 aa, Artificial Sequence; identical to SEQ ID NO: 16226
  Description of Artificial Sequence: Synthetic polypeptide
  XENP018276 1G6_H1.175_L1_IgG1_PVA_/S267K Light Chain

SEQ ID NO: 18147 - protein, 107 aa, Artificial Sequence; identical to SEQ ID NO: 10923
  Description of Artificial Sequence: Synthetic polypeptide
  VL of XENP018276

SEQ ID NO: 18148 - protein, 11 aa, Artificial Sequence
  Description of Artificial Sequence: Synthetic peptide
  XENP018276 vlCDR1
RASQSVSNDVA

SEQ ID NO: 18149 - protein, 7 aa, Artificial Sequence
  Description of Artificial Sequence: Synthetic peptide
  XENP018276 vlCDR2
YASHRYT

SEQ ID NO: 18150 - protein, 9 aa, Artificial Sequence
  Description of Artificial Sequence: Synthetic peptide
  XENP018276 vlCDR3
QQDYSSPRT

SEQ ID NO: 18151 - protein, 451 aa, Artificial Sequence
  Description of Artificial Sequence: Synthetic polypeptide
  XENP018277 1G6_H1.176_L1_IgG1_PVA_/S267K Heavy Chain
EVQLVESGGGLVKPGGSLRLSCAASGFTFSNYWMNWVRQAPGKGLEWVGEIRLKSNNYATHYAEPVKGRFTISRDDSKSTVYLQMNSLKTEDTAVYYCTRYFGNYGGYFDVWGAGTLVTVSSASTKGPSVFPLAPSSKSTSGGTAALGCLVKDYFPEPVTVSWNSGALTSGVHTFPAVLQSSGLYSLSSVVTVPSSSLGTQTYICNVNHKPSNTKVDKKVEPKSCDKTHTCPPCPAPPVAGPSVFLFPPKPKDTLMISRTPEVTCVVVDVKHEDPEVKFNWYVDGVEVHNAKTKPREEQYNSTYRVVSVLTVLHQDWLNGKEYKCKVSNKALPAPIEKTISKAKGQPREPQVYTLPPSREEMTKNQVSLTCLVKGFYPSDIAVEWESNGQPENNYKTTPPVLDSDGSFFLYSKLTVDKSRWQQGNVFSCSVMHEALHNHYTQKSLSLSPGK

SEQ ID NO: 18152 - protein, 122 aa, Artificial Sequence; identical to SEQ ID NO: 12611
  Description of Artificial Sequence: Synthetic polypeptide
  VH of XENP018277

SEQ ID NO: 18153 - protein, 5 aa, Artificial Sequence
  Description of Artificial Sequence: Synthetic peptide
  XENP018277 vhCDR1
NYWMN

SEQ ID NO: 18154 - protein, 19 aa, Artificial Sequence
  Description of Artificial Sequence: Synthetic peptide
  XENP018277 vhCDR2
EIRLKSNNYATHYAEPVKG

SEQ ID NO: 18155 - protein, 11 aa, Artificial Sequence
  Description of Artificial Sequence: Synthetic peptide
  XENP018277 vhCDR3
YFGNYGGYFDV

SEQ ID NO: 18156 - protein, 214 aa, Artificial Sequence; identical to SEQ ID NO: 16226
  Description of Artificial Sequence: Synthetic polypeptide
  XENP018277 1G6_H1.176_L1_IgG1_PVA_/S267K Light Chain

SEQ ID NO: 18157 - protein, 107 aa, Artificial Sequence; identical to SEQ ID NO: 10923
  Description of Artificial Sequence: Synthetic polypeptide
  VL of XENP018277

SEQ ID NO: 18158 - protein, 11 aa, Artificial Sequence
  Description of Artificial Sequence: Synthetic peptide
  XENP018277 vlCDR1
RASQSVSNDVA

SEQ ID NO: 18159 - protein, 7 aa, Artificial Sequence
  Description of Artificial Sequence: Synthetic peptide
  XENP018277 vlCDR2
YASHRYT

SEQ ID NO: 18160 - protein, 9 aa, Artificial Sequence
  Description of Artificial Sequence: Synthetic peptide
  XENP018277 vlCDR3
QQDYSSPRT

SEQ ID NO: 18161 - protein, 451 aa, Artificial Sequence
  Description of Artificial Sequence: Synthetic polypeptide
  XENP018278 1G6_H1.177_L1_IgG1_PVA_/S267K Heavy Chain
EVQLVESGGGLVKPGGSLRLSCAASGFTFSNYWMNWVRQAPGKGLEWVGEIRLKSNNYATHYAEPVKGRFTISRDDSKSTVYLQMNSLKTEDTAVYYCTRYHGNYGGYFDVWGAGTLVTVSSASTKGPSVFPLAPSSKSTSGGTAALGCLVKDYFPEPVTVSWNSGALTSGVHTFPAVLQSSGLYSLSSVVTVPSSSLGTQTYICNVNHKPSNTKVDKKVEPKSCDKTHTCPPCPAPPVAGPSVFLFPPKPKDTLMISRTPEVTCVVVDVKHEDPEVKFNWYVDGVEVHNAKTKPREEQYNSTYRVVSVLTVLHQDWLNGKEYKCKVSNKALPAPIEKTISKAKGQPREPQVYTLPPSREEMTKNQVSLTCLVKGFYPSDIAVEWESNGQPENNYKTTPPVLDSDGSFFLYSKLTVDKSRWQQGNVFSCSVMHEALHNHYTQKSLSLSPGK

SEQ ID NO: 18162 - protein, 122 aa, Artificial Sequence; identical to SEQ ID NO: 12620
  Description of Artificial Sequence: Synthetic polypeptide
  VH of XENP018278

SEQ ID NO: 18163 - protein, 5 aa, Artificial Sequence
  Description of Artificial Sequence: Synthetic peptide
  XENP018278 vhCDR1
NYWMN

SEQ ID NO: 18164 - protein, 19 aa, Artificial Sequence
  Description of Artificial Sequence: Synthetic peptide
  XENP018278 vhCDR2
EIRLKSNNYATHYAEPVKG

SEQ ID NO: 18165 - protein, 11 aa, Artificial Sequence
  Description of Artificial Sequence: Synthetic peptide
  XENP018278 vhCDR3
YHGNYGGYFDV

SEQ ID NO: 18166 - protein, 214 aa, Artificial Sequence; identical to SEQ ID NO: 16226
  Description of Artificial Sequence: Synthetic polypeptide
  XENP018278 1G6_H1.177_L1_IgG1_PVA_/S267K Light Chain

SEQ ID NO: 18167 - protein, 107 aa, Artificial Sequence; identical to SEQ ID NO: 10923
  Description of Artificial Sequence: Synthetic polypeptide
  VL of XENP018278

SEQ ID NO: 18168 - protein, 11 aa, Artificial Sequence
  Description of Artificial Sequence: Synthetic peptide
  XENP018278 vlCDR1
RASQSVSNDVA

SEQ ID NO: 18169 - protein, 7 aa, Artificial Sequence
  Description of Artificial Sequence: Synthetic peptide
  XENP018278 vlCDR2
YASHRYT

SEQ ID NO: 18170 - protein, 9 aa, Artificial Sequence
  Description of Artificial Sequence: Synthetic peptide
  XENP018278 vlCDR3
QQDYSSPRT

SEQ ID NO: 18171 - protein, 451 aa, Artificial Sequence
  Description of Artificial Sequence: Synthetic polypeptide
  XENP018279 1G6_H1.178_L1_IgG1_PVA_/S267K Heavy Chain
EVQLVESGGGLVKPGGSLRLSCAASGFTFSNYWMNWVRQAPGKGLEWVGEIRLKSNNYATHYAEPVKGRFTISRDDSKSTVYLQMNSLKTEDTAVYYCTRYLGNYGGYFDVWGAGTLVTVSSASTKGPSVFPLAPSSKSTSGGTAALGCLVKDYFPEPVTVSWNSGALTSGVHTFPAVLQSSGLYSLSSVVTVPSSSLGTQTYICNVNHKPSNTKVDKKVEPKSCDKTHTCPPCPAPPVAGPSVFLFPPKPKDTLMISRTPEVTCVVVDVKHEDPEVKFNWYVDGVEVHNAKTKPREEQYNSTYRVVSVLTVLHQDWLNGKEYKCKVSNKALPAPIEKTISKAKGQPREPQVYTLPPSREEMTKNQVSLTCLVKGFYPSDIAVEWESNGQPENNYKTTPPVLDSDGSFFLYSKLTVDKSRWQQGNVFSCSVMHEALHNHYTQKSLSLSPGK

SEQ ID NO: 18172 - protein, 122 aa, Artificial Sequence; identical to SEQ ID NO: 12629
  Description of Artificial Sequence: Synthetic polypeptide
  VH of XENP018279

SEQ ID NO: 18173 - protein, 5 aa, Artificial Sequence
  Description of Artificial Sequence: Synthetic peptide
  XENP018279 vhCDR1
NYWMN

SEQ ID NO: 18174 - protein, 19 aa, Artificial Sequence
  Description of Artificial Sequence: Synthetic peptide
  XENP018279 vhCDR2
EIRLKSNNYATHYAEPVKG

SEQ ID NO: 18175 - protein, 11 aa, Artificial Sequence
  Description of Artificial Sequence: Synthetic peptide
  XENP018279 vhCDR3
YLGNYGGYFDV

SEQ ID NO: 18176 - protein, 214 aa, Artificial Sequence; identical to SEQ ID NO: 16226
  Description of Artificial Sequence: Synthetic polypeptide
  XENP018279 1G6_H1.178_L1_IgG1_PVA_/S267K Light Chain

SEQ ID NO: 18177 - protein, 107 aa, Artificial Sequence; identical to SEQ ID NO: 10923
  Description of Artificial Sequence: Synthetic polypeptide
  VL of XENP018279

SEQ ID NO: 18178 - protein, 11 aa, Artificial Sequence
  Description of Artificial Sequence: Synthetic peptide
  XENP018279 vlCDR1
RASQSVSNDVA

SEQ ID NO: 18179 - protein, 7 aa, Artificial Sequence
  Description of Artificial Sequence: Synthetic peptide
  XENP018279 vlCDR2
YASHRYT

SEQ ID NO: 18180 - protein, 9 aa, Artificial Sequence
  Description of Artificial Sequence: Synthetic peptide
  XENP018279 vlCDR3
QQDYSSPRT

SEQ ID NO: 18181 - protein, 451 aa, Artificial Sequence
  Description of Artificial Sequence: Synthetic polypeptide
  XENP018280 1G6_H1.179_L1_IgG1_PVA_/S267K Heavy Chain
EVQLVESGGGLVKPGGSLRLSCAASGFTFSNYWMNWVRQAPGKGLEWVGEIRLKSNNYATHYAEPVKGRFTISRDDSKSTVYLQMNSLKTEDTAVYYCTRYWGNYGGYFDVWGAGTLVTVSSASTKGPSVFPLAPSSKSTSGGTAALGCLVKDYFPEPVTVSWNSGALTSGVHTFPAVLQSSGLYSLSSVVTVPSSSLGTQTYICNVNHKPSNTKVDKKVEPKSCDKTHTCPPCPAPPVAGPSVFLFPPKPKDTLMISRTPEVTCVVVDVKHEDPEVKFNWYVDGVEVHNAKTKPREEQYNSTYRVVSVLTVLHQDWLNGKEYKCKVSNKALPAPIEKTISKAKGQPREPQVYTLPPSREEMTKNQVSLTCLVKGFYPSDIAVEWESNGQPENNYKTTPPVLDSDGSFFLYSKLTVDKSRWQQGNVFSCSVMHEALHNHYTQKSLSLSPGK

SEQ ID NO: 18182 - protein, 122 aa, Artificial Sequence; identical to SEQ ID NO: 12638
  Description of Artificial Sequence: Synthetic polypeptide
  VH of XENP018280

SEQ ID NO: 18183 - protein, 5 aa, Artificial Sequence
  Description of Artificial Sequence: Synthetic peptide
  XENP018280 vhCDR1
NYWMN

SEQ ID NO: 18184 - protein, 19 aa, Artificial Sequence
  Description of Artificial Sequence: Synthetic peptide
  XENP018280 vhCDR2
EIRLKSNNYATHYAEPVKG

SEQ ID NO: 18185 - protein, 11 aa, Artificial Sequence
  Description of Artificial Sequence: Synthetic peptide
  XENP018280 vhCDR3
YWGNYGGYFDV

SEQ ID NO: 18186 - protein, 214 aa, Artificial Sequence; identical to SEQ ID NO: 16226
  Description of Artificial Sequence: Synthetic polypeptide
  XENP018280 1G6_H1.179_L1_IgG1_PVA_/S267K Light Chain

SEQ ID NO: 18187 - protein, 107 aa, Artificial Sequence; identical to SEQ ID NO: 10923
  Description of Artificial Sequence: Synthetic polypeptide
  VL of XENP018280

SEQ ID NO: 18188 - protein, 11 aa, Artificial Sequence
  Description of Artificial Sequence: Synthetic peptide
  XENP018280 vlCDR1
RASQSVSNDVA

SEQ ID NO: 18189 - protein, 7 aa, Artificial Sequence
  Description of Artificial Sequence: Synthetic peptide
  XENP018280 vlCDR2
YASHRYT

SEQ ID NO: 18190 - protein, 9 aa, Artificial Sequence
  Description of Artificial Sequence: Synthetic peptide
  XENP018280 vlCDR3
QQDYSSPRT

SEQ ID NO: 18191 - protein, 451 aa, Artificial Sequence
  Description of Artificial Sequence: Synthetic polypeptide
  XENP018281 1G6_H1.180_L1_IgG1_PVA_/S267K Heavy Chain
EVQLVESGGGLVKPGGSLRLSCAASGFTFSNYWMNWVRQAPGKGLEWVGEIRLKSNNYATHYAEPVKGRFTISRDDSKSTVYLQMNSLKTEDTAVYYCTRYVGNYGGYFDVWGAGTLVTVSSASTKGPSVFPLAPSSKSTSGGTAALGCLVKDYFPEPVTVSWNSGALTSGVHTFPAVLQSSGLYSLSSVVTVPSSSLGTQTYICNVNHKPSNTKVDKKVEPKSCDKTHTCPPCPAPPVAGPSVFLFPPKPKDTLMISRTPEVTCVVVDVKHEDPEVKFNWYVDGVEVHNAKTKPREEQYNSTYRVVSVLTVLHQDWLNGKEYKCKVSNKALPAPIEKTISKAKGQPREPQVYTLPPSREEMTKNQVSLTCLVKGFYPSDIAVEWESNGQPENNYKTTPPVLDSDGSFFLYSKLTVDKSRWQQGNVFSCSVMHEALHNHYTQKSLSLSPGK

SEQ ID NO: 18192 - protein, 122 aa, Artificial Sequence; identical to SEQ ID NO: 12647
  Description of Artificial Sequence: Synthetic polypeptide
  VH of XENP018281

SEQ ID NO: 18193 - protein, 5 aa, Artificial Sequence
  Description of Artificial Sequence: Synthetic peptide
  XENP018281 vhCDR1
NYWMN

SEQ ID NO: 18194 - protein, 19 aa, Artificial Sequence
  Description of Artificial Sequence: Synthetic peptide
  XENP018281 vhCDR2
EIRLKSNNYATHYAEPVKG

SEQ ID NO: 18195 - protein, 11 aa, Artificial Sequence
  Description of Artificial Sequence: Synthetic peptide
  XENP018281 vhCDR3
YVGNYGGYFDV

SEQ ID NO: 18196 - protein, 214 aa, Artificial Sequence; identical to SEQ ID NO: 16226
  Description of Artificial Sequence: Synthetic polypeptide
  XENP018281 1G6_H1.180_L1_IgG1_PVA_/S267K Light Chain

SEQ ID NO: 18197 - protein, 107 aa, Artificial Sequence; identical to SEQ ID NO: 10923
  Description of Artificial Sequence: Synthetic polypeptide
  VL of XENP018281

SEQ ID NO: 18198 - protein, 11 aa, Artificial Sequence
  Description of Artificial Sequence: Synthetic peptide
  XENP018281 vlCDR1
RASQSVSNDVA

SEQ ID NO: 18199 - protein, 7 aa, Artificial Sequence
  Description of Artificial Sequence: Synthetic peptide
  XENP018281 vlCDR2
YASHRYT

SEQ ID NO: 18200 - protein, 9 aa, Artificial Sequence
  Description of Artificial Sequence: Synthetic peptide
  XENP018281 vlCDR3
QQDYSSPRT

SEQ ID NO: 18201 - protein, 451 aa, Artificial Sequence
  Description of Artificial Sequence: Synthetic polypeptide
  XENP018282 1G6_H1.181_L1_IgG1_PVA_/S267K Heavy Chain
EVQLVESGGGLVKPGGSLRLSCAASGFTFSNYWMNWVRQAPGKGLEWVGEIRLKSNNYATHYAEPVKGRFTISRDDSKSTVYLQMNSLKTEDTAVYYCTRYAGNYGGYFDVWGAGTLVTVSSASTKGPSVFPLAPSSKSTSGGTAALGCLVKDYFPEPVTVSWNSGALTSGVHTFPAVLQSSGLYSLSSVVTVPSSSLGTQTYICNVNHKPSNTKVDKKVEPKSCDKTHTCPPCPAPPVAGPSVFLFPPKPKDTLMISRTPEVTCVVVDVKHEDPEVKFNWYVDGVEVHNAKTKPREEQYNSTYRVVSVLTVLHQDWLNGKEYKCKVSNKALPAPIEKTISKAKGQPREPQVYTLPPSREEMTKNQVSLTCLVKGFYPSDIAVEWESNGQPENNYKTTPPVLDSDGSFFLYSKLTVDKSRWQQGNVFSCSVMHEALHNHYTQKSLSLSPGK

SEQ ID NO: 18202 - protein, 122 aa, Artificial Sequence; identical to SEQ ID NO: 12656
  Description of Artificial Sequence: Synthetic polypeptide
  VH of XENP018282

SEQ ID NO: 18203 - protein, 5 aa, Artificial Sequence
  Description of Artificial Sequence: Synthetic peptide
  XENP018282 vhCDR1
NYWMN

SEQ ID NO: 18204 - protein, 19 aa, Artificial Sequence
  Description of Artificial Sequence: Synthetic peptide
  XENP018282 vhCDR2
EIRLKSNNYATHYAEPVKG

SEQ ID NO: 18205 - protein, 11 aa, Artificial Sequence
  Description of Artificial Sequence: Synthetic peptide
  XENP018282 vhCDR3
YAGNYGGYFDV

SEQ ID NO: 18206 - protein, 214 aa, Artificial Sequence; identical to SEQ ID NO: 16226
  Description of Artificial Sequence: Synthetic polypeptide
  XENP018282 1G6_H1.181_L1_IgG1_PVA_/S267K Light Chain

SEQ ID NO: 18207 - protein, 107 aa, Artificial Sequence; identical to SEQ ID NO: 10923
  Description of Artificial Sequence: Synthetic polypeptide
  VL of XENP018282

SEQ ID NO: 18208 - protein, 11 aa, Artificial Sequence
  Description of Artificial Sequence: Synthetic peptide
  XENP018282 vlCDR1
RASQSVSNDVA

SEQ ID NO: 18209 - protein, 7 aa, Artificial Sequence
  Description of Artificial Sequence: Synthetic peptide
  XENP018282 vlCDR2
YASHRYT

SEQ ID NO: 18210 - protein, 9 aa, Artificial Sequence
  Description of Artificial Sequence: Synthetic peptide
  XENP018282 vlCDR3
QQDYSSPRT

SEQ ID NO: 18211 - protein, 451 aa, Artificial Sequence
  Description of Artificial Sequence: Synthetic polypeptide
  XENP018283 1G6_H1.182_L1_IgG1_PVA_/S267K Heavy Chain
EVQLVESGGGLVKPGGSLRLSCAASGFTFSNYWMNWVRQAPGKGLEWVGEIRLKSNNYATHYAEPVKGRFTISRDDSKSTVYLQMNSLKTEDTAVYYCTRYQGNYGGYFDVWGAGTLVTVSSASTKGPSVFPLAPSSKSTSGGTAALGCLVKDYFPEPVTVSWNSGALTSGVHTFPAVLQSSGLYSLSSVVTVPSSSLGTQTYICNVNHKPSNTKVDKKVEPKSCDKTHTCPPCPAPPVAGPSVFLFPPKPKDTLMISRTPEVTCVVVDVKHEDPEVKFNWYVDGVEVHNAKTKPREEQYNSTYRVVSVLTVLHQDWLNGKEYKCKVSNKALPAPIEKTISKAKGQPREPQVYTLPPSREEMTKNQVSLTCLVKGFYPSDIAVEWESNGQPENNYKTTPPVLDSDGSFFLYSKLTVDKSRWQQGNVFSCSVMHEALHNHYTQKSLSLSPGK

SEQ ID NO: 18212 - protein, 122 aa, Artificial Sequence; identical to SEQ ID NO: 12665
  Description of Artificial Sequence: Synthetic polypeptide
  VH of XENP018283

SEQ ID NO: 18213 - protein, 5 aa, Artificial Sequence
  Description of Artificial Sequence: Synthetic peptide
  XENP018283 vhCDR1
NYWMN

SEQ ID NO: 18214 - protein, 19 aa, Artificial Sequence
  Description of Artificial Sequence: Synthetic peptide
  XENP018283 vhCDR2
EIRLKSNNYATHYAEPVKG

SEQ ID NO: 18215 - protein, 11 aa, Artificial Sequence
  Description of Artificial Sequence: Synthetic peptide
  XENP018283 vhCDR3
YQGNYGGYFDV

SEQ ID NO: 18216 - protein, 214 aa, Artificial Sequence; identical to SEQ ID NO: 16226
  Description of Artificial Sequence: Synthetic polypeptide
  XENP018283 1G6_H1.182_L1_IgG1_PVA_/S267K Light Chain

SEQ ID NO: 18217 - protein, 107 aa, Artificial Sequence; identical to SEQ ID NO: 10923
  Description of Artificial Sequence: Synthetic polypeptide
  VL of XENP018283

SEQ ID NO: 18218 - protein, 11 aa, Artificial Sequence
  Description of Artificial Sequence: Synthetic peptide
  XENP018283 vlCDR1
RASQSVSNDVA

SEQ ID NO: 18219 - protein, 7 aa, Artificial Sequence
  Description of Artificial Sequence: Synthetic peptide
  XENP018283 vlCDR2
YASHRYT

SEQ ID NO: 18220 - protein, 9 aa, Artificial Sequence
  Description of Artificial Sequence: Synthetic peptide
  XENP018283 vlCDR3
QQDYSSPRT

SEQ ID NO: 18221 - protein, 451 aa, Artificial Sequence
  Description of Artificial Sequence: Synthetic polypeptide
  XENP018284 1G6_H1.183_L1_IgG1_PVA_/S267K Heavy Chain
EVQLVESGGGLVKPGGSLRLSCAASGFTFSNYWMNWVRQAPGKGLEWVGEIRLKSNNYATHYAEPVKGRFTISRDDSKSTVYLQMNSLKTEDTAVYYCTRYDGNYGGYFDVWGAGTLVTVSSASTKGPSVFPLAPSSKSTSGGTAALGCLVKDYFPEPVTVSWNSGALTSGVHTFPAVLQSSGLYSLSSVVTVPSSSLGTQTYICNVNHKPSNTKVDKKVEPKSCDKTHTCPPCPAPPVAGPSVFLFPPKPKDTLMISRTPEVTCVVVDVKHEDPEVKFNWYVDGVEVHNAKTKPREEQYNSTYRVVSVLTVLHQDWLNGKEYKCKVSNKALPAPIEKTISKAKGQPREPQVYTLPPSREEMTKNQVSLTCLVKGFYPSDIAVEWESNGQPENNYKTTPPVLDSDGSFFLYSKLTVDKSRWQQGNVFSCSVMHEALHNHYTQKSLSLSPGK

SEQ ID NO: 18222 - protein, 122 aa, Artificial Sequence; identical to SEQ ID NO: 12674
  Description of Artificial Sequence: Synthetic polypeptide
  VH of XENP018284

SEQ ID NO: 18223 - protein, 5 aa, Artificial Sequence
  Description of Artificial Sequence: Synthetic peptide
  XENP018284 vhCDR1
NYWMN

SEQ ID NO: 18224 - protein, 19 aa, Artificial Sequence
  Description of Artificial Sequence: Synthetic peptide
  XENP018284 vhCDR2
EIRLKSNNYATHYAEPVKG

SEQ ID NO: 18225 - protein, 11 aa, Artificial Sequence
  Description of Artificial Sequence: Synthetic peptide
  XENP018284 vhCDR3
YDGNYGGYFDV

SEQ ID NO: 18226 - protein, 214 aa, Artificial Sequence; identical to SEQ ID NO: 16226
  Description of Artificial Sequence: Synthetic polypeptide
  XENP018284 1G6_H1.183_L1_IgG1_PVA_/S267K Light Chain

SEQ ID NO: 18227 - protein, 107 aa, Artificial Sequence; identical to SEQ ID NO: 10923
  Description of Artificial Sequence: Synthetic polypeptide
  VL of XENP018284

SEQ ID NO: 18228 - protein, 11 aa, Artificial Sequence
  Description of Artificial Sequence: Synthetic peptide
  XENP018284 vlCDR1
RASQSVSNDVA

SEQ ID NO: 18229 - protein, 7 aa, Artificial Sequence
  Description of Artificial Sequence: Synthetic peptide
  XENP018284 vlCDR2
YASHRYT

SEQ ID NO: 18230 - protein, 9 aa, Artificial Sequence
  Description of Artificial Sequence: Synthetic peptide
  XENP018284 vlCDR3
QQDYSSPRT

SEQ ID NO: 18231 - protein, 451 aa, Artificial Sequence
  Description of Artificial Sequence: Synthetic polypeptide
  XENP018285 1G6_H1.184_L1_IgG1_PVA_/S267K Heavy Chain
EVQLVESGGGLVKPGGSLRLSCAASGFTFSNYWMNWVRQAPGKGLEWVGEIRLKSNNYATHYAEPVKGRFTISRDDSKSTVYLQMNSLKTEDTAVYYCTRYKGNYGGYFDVWGAGTLVTVSSASTKGPSVFPLAPSSKSTSGGTAALGCLVKDYFPEPVTVSWNSGALTSGVHTFPAVLQSSGLYSLSSVVTVPSSSLGTQTYICNVNHKPSNTKVDKKVEPKSCDKTHTCPPCPAPPVAGPSVFLFPPKPKDTLMISRTPEVTCVVVDVKHEDPEVKFNWYVDGVEVHNAKTKPREEQYNSTYRVVSVLTVLHQDWLNGKEYKCKVSNKALPAPIEKTISKAKGQPREPQVYTLPPSREEMTKNQVSLTCLVKGFYPSDIAVEWESNGQPENNYKTTPPVLDSDGSFFLYSKLTVDKSRWQQGNVFSCSVMHEALHNHYTQKSLSLSPGK

SEQ ID NO: 18232 - protein, 122 aa, Artificial Sequence; identical to SEQ ID NO: 12683
  Description of Artificial Sequence: Synthetic polypeptide
  VH of XENP018285

SEQ ID NO: 18233 - protein, 5 aa, Artificial Sequence
  Description of Artificial Sequence: Synthetic peptide
  XENP018285 vhCDR1
NYWMN

SEQ ID NO: 18234 - protein, 19 aa, Artificial Sequence
  Description of Artificial Sequence: Synthetic peptide
  XENP018285 vhCDR2
EIRLKSNNYATHYAEPVKG

SEQ ID NO: 18235 - protein, 11 aa, Artificial Sequence
  Description of Artificial Sequence: Synthetic peptide
  XENP018285 vhCDR3
YKGNYGGYFDV

SEQ ID NO: 18236 - protein, 214 aa, Artificial Sequence; identical to SEQ ID NO: 16226
  Description of Artificial Sequence: Synthetic polypeptide
  XENP018285 1G6_H1.184_L1_IgG1_PVA_/S267K Light Chain

SEQ ID NO: 18237 - protein, 107 aa, Artificial Sequence; identical to SEQ ID NO: 10923
  Description of Artificial Sequence: Synthetic polypeptide
  VL of XENP018285

SEQ ID NO: 18238 - protein, 11 aa, Artificial Sequence
  Description of Artificial Sequence: Synthetic peptide
  XENP018285 vlCDR1
RASQSVSNDVA

SEQ ID NO: 18239 - protein, 7 aa, Artificial Sequence
  Description of Artificial Sequence: Synthetic peptide
  XENP018285 vlCDR2
YASHRYT

SEQ ID NO: 18240 - protein, 9 aa, Artificial Sequence
  Description of Artificial Sequence: Synthetic peptide
  XENP018285 vlCDR3
QQDYSSPRT

SEQ ID NO: 18241 - protein, 451 aa, Artificial Sequence
  Description of Artificial Sequence: Synthetic polypeptide
  XENP018286 1G6_H1.185_L1_IgG1_PVA_/S267K Heavy Chain
EVQLVESGGGLVKPGGSLRLSCAASGFTFSNYWMNWVRQAPGKGLEWVGEIRLKSNNYATHYAEPVKGRFTISRDDSKSTVYLQMNSLKTEDTAVYYCTRYYANYGGYFDVWGAGTLVTVSSASTKGPSVFPLAPSSKSTSGGTAALGCLVKDYFPEPVTVSWNSGALTSGVHTFPAVLQSSGLYSLSSVVTVPSSSLGTQTYICNVNHKPSNTKVDKKVEPKSCDKTHTCPPCPAPPVAGPSVFLFPPKPKDTLMISRTPEVTCVVVDVKHEDPEVKFNWYVDGVEVHNAKTKPREEQYNSTYRVVSVLTVLHQDWLNGKEYKCKVSNKALPAPIEKTISKAKGQPREPQVYTLPPSREEMTKNQVSLTCLVKGFYPSDIAVEWESNGQPENNYKTTPPVLDSDGSFFLYSKLTVDKSRWQQGNVFSCSVMHEALHNHYTQKSLSLSPGK

SEQ ID NO: 18242 - protein, 122 aa, Artificial Sequence; identical to SEQ ID NO: 12692
  Description of Artificial Sequence: Synthetic polypeptide
  VH of XENP018286

SEQ ID NO: 18243 - protein, 5 aa, Artificial Sequence
  Description of Artificial Sequence: Synthetic peptide
  XENP018286 vhCDR1
NYWMN

SEQ ID NO: 18244 - protein, 19 aa, Artificial Sequence
  Description of Artificial Sequence: Synthetic peptide
  XENP018286 vhCDR2
EIRLKSNNYATHYAEPVKG

SEQ ID NO: 18245 - protein, 11 aa, Artificial Sequence
  Description of Artificial Sequence: Synthetic peptide
  XENP018286 vhCDR3
YYANYGGYFDV

SEQ ID NO: 18246 - protein, 214 aa, Artificial Sequence; identical to SEQ ID NO: 16226
  Description of Artificial Sequence: Synthetic polypeptide
  XENP018286 1G6_H1.185_L1_IgG1_PVA_/S267K Light Chain

SEQ ID NO: 18247 - protein, 107 aa, Artificial Sequence; identical to SEQ ID NO: 10923
  Description of Artificial Sequence: Synthetic polypeptide
  VL of XENP018286

SEQ ID NO: 18248 - protein, 11 aa, Artificial Sequence
  Description of Artificial Sequence: Synthetic peptide
  XENP018286 vlCDR1
RASQSVSNDVA

SEQ ID NO: 18249 - protein, 7 aa, Artificial Sequence
  Description of Artificial Sequence: Synthetic peptide
  XENP018286 vlCDR2
YASHRYT

SEQ ID NO: 18250 - protein, 9 aa, Artificial Sequence
  Description of Artificial Sequence: Synthetic peptide
  XENP018286 vlCDR3
QQDYSSPRT

SEQ ID NO: 18251 - protein, 451 aa, Artificial Sequence
  Description of Artificial Sequence: Synthetic polypeptide
  XENP018287 1G6_H1.186_L1_IgG1_PVA_/S267K Heavy Chain
EVQLVESGGGLVKPGGSLRLSCAASGFTFSNYWMNWVRQAPGKGLEWVGEIRLKSNNYATHYAEPVKGRFTISRDDSKSTVYLQMNSLKTEDTAVYYCTRYYSNYGGYFDVWGAGTLVTVSSASTKGPSVFPLAPSSKSTSGGTAALGCLVKDYFPEPVTVSWNSGALTSGVHTFPAVLQSSGLYSLSSVVTVPSSSLGTQTYICNVNHKPSNTKVDKKVEPKSCDKTHTCPPCPAPPVAGPSVFLFPPKPKDTLMISRTPEVTCVVVDVKHEDPEVKFNWYVDGVEVHNAKTKPREEQYNSTYRVVSVLTVLHQDWLNGKEYKCKVSNKALPAPIEKTISKAKGQPREPQVYTLPPSREEMTKNQVSLTCLVKGFYPSDIAVEWESNGQPENNYKTTPPVLDSDGSFFLYSKLTVDKSRWQQGNVFSCSVMHEALHNHYTQKSLSLSPGK

SEQ ID NO: 18252 - protein, 122 aa, Artificial Sequence; identical to SEQ ID NO: 12701
  Description of Artificial Sequence: Synthetic polypeptide
  VH of XENP018287

SEQ ID NO: 18253 - protein, 5 aa, Artificial Sequence
  Description of Artificial Sequence: Synthetic peptide
  XENP018287 vhCDR1
NYWMN

SEQ ID NO: 18254 - protein, 19 aa, Artificial Sequence
  Description of Artificial Sequence: Synthetic peptide
  XENP018287 vhCDR2
EIRLKSNNYATHYAEPVKG

SEQ ID NO: 18255 - protein, 11 aa, Artificial Sequence
  Description of Artificial Sequence: Synthetic peptide
  XENP018287 vhCDR3
YYSNYGGYFDV

SEQ ID NO: 18256 - protein, 214 aa, Artificial Sequence; identical to SEQ ID NO: 16226
  Description of Artificial Sequence: Synthetic polypeptide
  XENP018287 1G6_H1.186_L1_IgG1_PVA_/S267K Light Chain

SEQ ID NO: 18257 - protein, 107 aa, Artificial Sequence; identical to SEQ ID NO: 10923
  Description of Artificial Sequence: Synthetic polypeptide
  VL of XENP018287

SEQ ID NO: 18258 - protein, 11 aa, Artificial Sequence
  Description of Artificial Sequence: Synthetic peptide
  XENP018287 vlCDR1
RASQSVSNDVA

SEQ ID NO: 18259 - protein, 7 aa, Artificial Sequence
  Description of Artificial Sequence: Synthetic peptide
  XENP018287 vlCDR2
YASHRYT

SEQ ID NO: 18260 - protein, 9 aa, Artificial Sequence
  Description of Artificial Sequence: Synthetic peptide
  XENP018287 vlCDR3
QQDYSSPRT

SEQ ID NO: 18261 - protein, 451 aa, Artificial Sequence
  Description of Artificial Sequence: Synthetic polypeptide
  XENP018288 1G6_H1.187_L1_IgG1_PVA_/S267K Heavy Chain
EVQLVESGGGLVKPGGSLRLSCAASGFTFSNYWMNWVRQAPGKGLEWVGEIRLKSNNYATHYAEPVKGRFTISRDDSKSTVYLQMNSLKTEDTAVYYCTRYYTNYGGYFDVWGAGTLVTVSSASTKGPSVFPLAPSSKSTSGGTAALGCLVKDYFPEPVTVSWNSGALTSGVHTFPAVLQSSGLYSLSSVVTVPSSSLGTQTYICNVNHKPSNTKVDKKVEPKSCDKTHTCPPCPAPPVAGPSVFLFPPKPKDTLMISRTPEVTCVVVDVKHEDPEVKFNWYVDGVEVHNAKTKPREEQYNSTYRVVSVLTVLHQDWLNGKEYKCKVSNKALPAPIEKTISKAKGQPREPQVYTLPPSREEMTKNQVSLTCLVKGFYPSDIAVEWESNGQPENNYKTTPPVLDSDGSFFLYSKLTVDKSRWQQGNVFSCSVMHEALHNHYTQKSLSLSPGK

SEQ ID NO: 18262 - protein, 122 aa, Artificial Sequence; identical to SEQ ID NO: 12710
  Description of Artificial Sequence: Synthetic polypeptide
  VH of XENP018288

SEQ ID NO: 18263 - protein, 5 aa, Artificial Sequence
  Description of Artificial Sequence: Synthetic peptide
  XENP018288 vhCDR1
NYWMN

SEQ ID NO: 18264 - protein, 19 aa, Artificial Sequence
  Description of Artificial Sequence: Synthetic peptide
  XENP018288 vhCDR2
EIRLKSNNYATHYAEPVKG

SEQ ID NO: 18265 - protein, 11 aa, Artificial Sequence
  Description of Artificial Sequence: Synthetic peptide
  XENP018288 vhCDR3
YYTNYGGYFDV

SEQ ID NO: 18266 - protein, 214 aa, Artificial Sequence; identical to SEQ ID NO: 16226
  Description of Artificial Sequence: Synthetic polypeptide
  XENP018288 1G6_H1.187_L1_IgG1_PVA_/S267K Light Chain

SEQ ID NO: 18267 - protein, 107 aa, Artificial Sequence; identical to SEQ ID NO: 10923
  Description of Artificial Sequence: Synthetic polypeptide
  VL of XENP018288

SEQ ID NO: 18268 - protein, 11 aa, Artificial Sequence
  Description of Artificial Sequence: Synthetic peptide
  XENP018288 vlCDR1
RASQSVSNDVA

SEQ ID NO: 18269 - protein, 7 aa, Artificial Sequence
  Description of Artificial Sequence: Synthetic peptide
  XENP018288 vlCDR2
YASHRYT

SEQ ID NO: 18270 - protein, 9 aa, Artificial Sequence
  Description of Artificial Sequence: Synthetic peptide
  XENP018288 vlCDR3
QQDYSSPRT

SEQ ID NO: 18271 - protein, 451 aa, Artificial Sequence
  Description of Artificial Sequence: Synthetic polypeptide
  XENP018289 1G6_H1.188_L1_IgG1_PVA_/S267K Heavy Chain
EVQLVESGGGLVKPGGSLRLSCAASGFTFSNYWMNWVRQAPGKGLEWVGEIRLKSNNYATHYAEPVKGRFTISRDDSKSTVYLQMNSLKTEDTAVYYCTRYYQNYGGYFDVWGAGTLVTVSSASTKGPSVFPLAPSSKSTSGGTAALGCLVKDYFPEPVTVSWNSGALTSGVHTFPAVLQSSGLYSLSSVVTVPSSSLGTQTYICNVNHKPSNTKVDKKVEPKSCDKTHTCPPCPAPPVAGPSVFLFPPKPKDTLMISRTPEVTCVVVDVKHEDPEVKFNWYVDGVEVHNAKTKPREEQYNSTYRVVSVLTVLHQDWLNGKEYKCKVSNKALPAPIEKTISKAKGQPREPQVYTLPPSREEMTKNQVSLTCLVKGFYPSDIAVEWESNGQPENNYKTTPPVLDSDGSFFLYSKLTVDKSRWQQGNVFSCSVMHEALHNHYTQKSLSLSPGK

SEQ ID NO: 18272 - protein, 122 aa, Artificial Sequence; identical to SEQ ID NO: 12719
  Description of Artificial Sequence: Synthetic polypeptide
  VH of XENP018289

SEQ ID NO: 18273 - protein, 5 aa, Artificial Sequence
  Description of Artificial Sequence: Synthetic peptide
  XENP018289 vhCDR1
NYWMN

SEQ ID NO: 18274 - protein, 19 aa, Artificial Sequence
  Description of Artificial Sequence: Synthetic peptide
  XENP018289 vhCDR2
EIRLKSNNYATHYAEPVKG

SEQ ID NO: 18275 - protein, 11 aa, Artificial Sequence
  Description of Artificial Sequence: Synthetic peptide
  XENP018289 vhCDR3
YYQNYGGYFDV

SEQ ID NO: 18276 - protein, 214 aa, Artificial Sequence; identical to SEQ ID NO: 16226
  Description of Artificial Sequence: Synthetic polypeptide
  XENP018289 1G6_H1.188_L1_IgG1_PVA_/S267K Light Chain

SEQ ID NO: 18277 - protein, 107 aa, Artificial Sequence; identical to SEQ ID NO: 10923
  Description of Artificial Sequence: Synthetic polypeptide
  VL of XENP018289

SEQ ID NO: 18278 - protein, 11 aa, Artificial Sequence
  Description of Artificial Sequence: Synthetic peptide
  XENP018289 vlCDR1
RASQSVSNDVA

SEQ ID NO: 18279 - protein, 7 aa, Artificial Sequence
  Description of Artificial Sequence: Synthetic peptide
  XENP018289 vlCDR2
YASHRYT

SEQ ID NO: 18280 - protein, 9 aa, Artificial Sequence
  Description of Artificial Sequence: Synthetic peptide
  XENP018289 vlCDR3
QQDYSSPRT

SEQ ID NO: 18281 - protein, 451 aa, Artificial Sequence
  Description of Artificial Sequence: Synthetic polypeptide
  XENP018290 1G6_H1.189_L1_IgG1_PVA_/S267K Heavy Chain
EVQLVESGGGLVKPGGSLRLSCAASGFTFSNYWMNWVRQAPGKGLEWVGEIRLKSNNYATHYAEPVKGRFTISRDDSKSTVYLQMNSLKTEDTAVYYCTRYYHNYGGYFDVWGAGTLVTVSSASTKGPSVFPLAPSSKSTSGGTAALGCLVKDYFPEPVTVSWNSGALTSGVHTFPAVLQSSGLYSLSSVVTVPSSSLGTQTYICNVNHKPSNTKVDKKVEPKSCDKTHTCPPCPAPPVAGPSVFLFPPKPKDTLMISRTPEVTCVVVDVKHEDPEVKFNWYVDGVEVHNAKTKPREEQYNSTYRVVSVLTVLHQDWLNGKEYKCKVSNKALPAPIEKTISKAKGQPREPQVYTLPPSREEMTKNQVSLTCLVKGFYPSDIAVEWESNGQPENNYKTTPPVLDSDGSFFLYSKLTVDKSRWQQGNVFSCSVMHEALHNHYTQKSLSLSPGK

SEQ ID NO: 18282 - protein, 122 aa, Artificial Sequence; identical to SEQ ID NO: 12728
  Description of Artificial Sequence: Synthetic polypeptide
  VH of XENP018290

SEQ ID NO: 18283 - protein, 5 aa, Artificial Sequence
  Description of Artificial Sequence: Synthetic peptide
  XENP018290 vhCDR1
NYWMN

SEQ ID NO: 18284 - protein, 19 aa, Artificial Sequence
  Description of Artificial Sequence: Synthetic peptide
  XENP018290 vhCDR2
EIRLKSNNYATHYAEPVKG

SEQ ID NO: 18285 - protein, 11 aa, Artificial Sequence
  Description of Artificial Sequence: Synthetic peptide
  XENP018290 vhCDR3
YYHNYGGYFDV

SEQ ID NO: 18286 - protein, 214 aa, Artificial Sequence; identical to SEQ ID NO: 16226
  Description of Artificial Sequence: Synthetic polypeptide
  XENP018290 1G6_H1.189_L1_IgG1_PVA_/S267K Light Chain

SEQ ID NO: 18287 - protein, 107 aa, Artificial Sequence; identical to SEQ ID NO: 10923
  Description of Artificial Sequence: Synthetic polypeptide
  VL of XENP018290

SEQ ID NO: 18288 - protein, 11 aa, Artificial Sequence
  Description of Artificial Sequence: Synthetic peptide
  XENP018290 vlCDR1
RASQSVSNDVA

SEQ ID NO: 18289 - protein, 7 aa, Artificial Sequence
  Description of Artificial Sequence: Synthetic peptide
  XENP018290 vlCDR2
YASHRYT

SEQ ID NO: 18290 - protein, 9 aa, Artificial Sequence
  Description of Artificial Sequence: Synthetic peptide
  XENP018290 vlCDR3
QQDYSSPRT

SEQ ID NO: 18291 - protein, 451 aa, Artificial Sequence
  Description of Artificial Sequence: Synthetic polypeptide
  XENP018291 1G6_H1.190_L1_IgG1_PVA_/S267K Heavy Chain
EVQLVESGGGLVKPGGSLRLSCAASGFTFSNYWMNWVRQAPGKGLEWVGEIRLKSNNYATHYAEPVKGRFTISRDDSKSTVYLQMNSLKTEDTAVYYCTRYYDNYGGYFDVWGAGTLVTVSSASTKGPSVFPLAPSSKSTSGGTAALGCLVKDYFPEPVTVSWNSGALTSGVHTFPAVLQSSGLYSLSSVVTVPSSSLGTQTYICNVNHKPSNTKVDKKVEPKSCDKTHTCPPCPAPPVAGPSVFLFPPKPKDTLMISRTPEVTCVVVDVKHEDPEVKFNWYVDGVEVHNAKTKPREEQYNSTYRVVSVLTVLHQDWLNGKEYKCKVSNKALPAPIEKTISKAKGQPREPQVYTLPPSREEMTKNQVSLTCLVKGFYPSDIAVEWESNGQPENNYKTTPPVLDSDGSFFLYSKLTVDKSRWQQGNVFSCSVMHEALHNHYTQKSLSLSPGK

SEQ ID NO: 18292 - protein, 122 aa, Artificial Sequence; identical to SEQ ID NO: 12737
  Description of Artificial Sequence: Synthetic polypeptide
  VH of XENP018291

SEQ ID NO: 18293 - protein, 5 aa, Artificial Sequence
  Description of Artificial Sequence: Synthetic peptide
  XENP018291 vhCDR1
NYWMN

SEQ ID NO: 18294 - protein, 19 aa, Artificial Sequence
  Description of Artificial Sequence: Synthetic peptide
  XENP018291 vhCDR2
EIRLKSNNYATHYAEPVKG

SEQ ID NO: 18295 - protein, 11 aa, Artificial Sequence
  Description of Artificial Sequence: Synthetic peptide
  XENP018291 vhCDR3
YYDNYGGYFDV

SEQ ID NO: 18296 - protein, 214 aa, Artificial Sequence; identical to SEQ ID NO: 16226
  Description of Artificial Sequence: Synthetic polypeptide
  XENP018291 1G6_H1.190_L1_IgG1_PVA_/S267K Light Chain

SEQ ID NO: 18297 - protein, 107 aa, Artificial Sequence; identical to SEQ ID NO: 10923
  Description of Artificial Sequence: Synthetic polypeptide
  VL of XENP018291

SEQ ID NO: 18298 - protein, 11 aa, Artificial Sequence
  Description of Artificial Sequence: Synthetic peptide
  XENP018291 vlCDR1
RASQSVSNDVA

SEQ ID NO: 18299 - protein, 7 aa, Artificial Sequence
  Description of Artificial Sequence: Synthetic peptide
  XENP018291 vlCDR2
YASHRYT

SEQ ID NO: 18300 - protein, 9 aa, Artificial Sequence
  Description of Artificial Sequence: Synthetic peptide
  XENP018291 vlCDR3
QQDYSSPRT

SEQ ID NO: 18301 - protein, 451 aa, Artificial Sequence
  Description of Artificial Sequence: Synthetic polypeptide
  XENP018292 1G6_H1.191_L1_IgG1_PVA_/S267K Heavy Chain
EVQLVESGGGLVKPGGSLRLSCAASGFTFSNYWMNWVRQAPGKGLEWVGEIRLKSNNYATHYAEPVKGRFTISRDDSKSTVYLQMNSLKTEDTAVYYCTRYYKNYGGYFDVWGAGTLVTVSSASTKGPSVFPLAPSSKSTSGGTAALGCLVKDYFPEPVTVSWNSGALTSGVHTFPAVLQSSGLYSLSSVVTVPSSSLGTQTYICNVNHKPSNTKVDKKVEPKSCDKTHTCPPCPAPPVAGPSVFLFPPKPKDTLMISRTPEVTCVVVDVKHEDPEVKFNWYVDGVEVHNAKTKPREEQYNSTYRVVSVLTVLHQDWLNGKEYKCKVSNKALPAPIEKTISKAKGQPREPQVYTLPPSREEMTKNQVSLTCLVKGFYPSDIAVEWESNGQPENNYKTTPPVLDSDGSFFLYSKLTVDKSRWQQGNVFSCSVMHEALHNHYTQKSLSLSPGK

SEQ ID NO: 18302 - protein, 122 aa, Artificial Sequence; identical to SEQ ID NO: 12746
  Description of Artificial Sequence: Synthetic polypeptide
  VH of XENP018292

SEQ ID NO: 18303 - protein, 5 aa, Artificial Sequence
  Description of Artificial Sequence: Synthetic peptide
  XENP018292 vhCDR1
NYWMN

SEQ ID NO: 18304 - protein, 19 aa, Artificial Sequence
  Description of Artificial Sequence: Synthetic peptide
  XENP018292 vhCDR2
EIRLKSNNYATHYAEPVKG

SEQ ID NO: 18305 - protein, 11 aa, Artificial Sequence
  Description of Artificial Sequence: Synthetic peptide
  XENP018292 vhCDR3
YYKNYGGYFDV

SEQ ID NO: 18306 - protein, 214 aa, Artificial Sequence; identical to SEQ ID NO: 16226
  Description of Artificial Sequence: Synthetic polypeptide
  XENP018292 1G6_H1.191_L1_IgG1_PVA_/S267K Light Chain

SEQ ID NO: 18307 - protein, 107 aa, Artificial Sequence; identical to SEQ ID NO: 10923
  Description of Artificial Sequence: Synthetic polypeptide
  VL of XENP018292

SEQ ID NO: 18308 - protein, 11 aa, Artificial Sequence
  Description of Artificial Sequence: Synthetic peptide
  XENP018292 vlCDR1
RASQSVSNDVA

SEQ ID NO: 18309 - protein, 7 aa, Artificial Sequence
  Description of Artificial Sequence: Synthetic peptide
  XENP018292 vlCDR2
YASHRYT

SEQ ID NO: 18310 - protein, 9 aa, Artificial Sequence
  Description of Artificial Sequence: Synthetic peptide
  XENP018292 vlCDR3
QQDYSSPRT

SEQ ID NO: 18311 - protein, 451 aa, Artificial Sequence
  Description of Artificial Sequence: Synthetic polypeptide
  XENP018293 1G6_H1.192_L1_IgG1_PVA_/S267K Heavy Chain
EVQLVESGGGLVKPGGSLRLSCAASGFTFSNYWMNWVRQAPGKGLEWVGEIRLKSNNYATHYAEPVKGRFTISRDDSKSTVYLQMNSLKTEDTAVYYCTRYYLNYGGYFDVWGAGTLVTVSSASTKGPSVFPLAPSSKSTSGGTAALGCLVKDYFPEPVTVSWNSGALTSGVHTFPAVLQSSGLYSLSSVVTVPSSSLGTQTYICNVNHKPSNTKVDKKVEPKSCDKTHTCPPCPAPPVAGPSVFLFPPKPKDTLMISRTPEVTCVVVDVKHEDPEVKFNWYVDGVEVHNAKTKPREEQYNSTYRVVSVLTVLHQDWLNGKEYKCKVSNKALPAPIEKTISKAKGQPREPQVYTLPPSREEMTKNQVSLTCLVKGFYPSDIAVEWESNGQPENNYKTTPPVLDSDGSFFLYSKLTVDKSRWQQGNVFSCSVMHEALHNHYTQKSLSLSPGK

SEQ ID NO: 18312 - protein, 122 aa, Artificial Sequence; identical to SEQ ID NO: 12755
  Description of Artificial Sequence: Synthetic polypeptide
  VH of XENP018293

SEQ ID NO: 18313 - protein, 5 aa, Artificial Sequence
  Description of Artificial Sequence: Synthetic peptide
  XENP018293 vhCDR1
NYWMN

SEQ ID NO: 18314 - protein, 19 aa, Artificial Sequence
  Description of Artificial Sequence: Synthetic peptide
  XENP018293 vhCDR2
EIRLKSNNYATHYAEPVKG

SEQ ID NO: 18315 - protein, 11 aa, Artificial Sequence
  Description of Artificial Sequence: Synthetic peptide
  XENP018293 vhCDR3
YYLNYGGYFDV

SEQ ID NO: 18316 - protein, 214 aa, Artificial Sequence; identical to SEQ ID NO: 16226
  Description of Artificial Sequence: Synthetic polypeptide
  XENP018293 1G6_H1.192_L1_IgG1_PVA_/S267K Light Chain

SEQ ID NO: 18317 - protein, 107 aa, Artificial Sequence; identical to SEQ ID NO: 10923
  Description of Artificial Sequence: Synthetic polypeptide
  VL of XENP018293

SEQ ID NO: 18318 - protein, 11 aa, Artificial Sequence
  Description of Artificial Sequence: Synthetic peptide
  XENP018293 vlCDR1
RASQSVSNDVA

SEQ ID NO: 18319 - protein, 7 aa, Artificial Sequence
  Description of Artificial Sequence: Synthetic peptide
  XENP018293 vlCDR2
YASHRYT

SEQ ID NO: 18320 - protein, 9 aa, Artificial Sequence
  Description of Artificial Sequence: Synthetic peptide
  XENP018293 vlCDR3
QQDYSSPRT

SEQ ID NO: 18321 - protein, 451 aa, Artificial Sequence
  Description of Artificial Sequence: Synthetic polypeptide
  XENP018294 1G6_H1.193_L1_IgG1_PVA_/S267K Heavy Chain
EVQLVESGGGLVKPGGSLRLSCAASGFTFSNYWMNWVRQAPGKGLEWVGEIRLKSNNYATHYAEPVKGRFTISRDDSKSTVYLQMNSLKTEDTAVYYCTRYYFNYGGYFDVWGAGTLVTVSSASTKGPSVFPLAPSSKSTSGGTAALGCLVKDYFPEPVTVSWNSGALTSGVHTFPAVLQSSGLYSLSSVVTVPSSSLGTQTYICNVNHKPSNTKVDKKVEPKSCDKTHTCPPCPAPPVAGPSVFLFPPKPKDTLMISRTPEVTCVVVDVKHEDPEVKFNWYVDGVEVHNAKTKPREEQYNSTYRVVSVLTVLHQDWLNGKEYKCKVSNKALPAPIEKTISKAKGQPREPQVYTLPPSREEMTKNQVSLTCLVKGFYPSDIAVEWESNGQPENNYKTTPPVLDSDGSFFLYSKLTVDKSRWQQGNVFSCSVMHEALHNHYTQKSLSLSPGK

SEQ ID NO: 18322 - protein, 122 aa, Artificial Sequence; identical to SEQ ID NO: 12764
  Description of Artificial Sequence: Synthetic polypeptide
  VH of XENP018294

SEQ ID NO: 18323 - protein, 5 aa, Artificial Sequence
  Description of Artificial Sequence: Synthetic peptide
  XENP018294 vhCDR1
NYWMN

SEQ ID NO: 18324 - protein, 19 aa, Artificial Sequence
  Description of Artificial Sequence: Synthetic peptide
  XENP018294 vhCDR2
EIRLKSNNYATHYAEPVKG

SEQ ID NO: 18325 - protein, 11 aa, Artificial Sequence
  Description of Artificial Sequence: Synthetic peptide
  XENP018294 vhCDR3
YYFNYGGYFDV

SEQ ID NO: 18326 - protein, 214 aa, Artificial Sequence; identical to SEQ ID NO: 16226
  Description of Artificial Sequence: Synthetic polypeptide
  XENP018294 1G6_H1.193_L1_IgG1_PVA_/S267K Light Chain

SEQ ID NO: 18327 - protein, 107 aa, Artificial Sequence; identical to SEQ ID NO: 10923
  Description of Artificial Sequence: Synthetic polypeptide
  VL of XENP018294

SEQ ID NO: 18328 - protein, 11 aa, Artificial Sequence
  Description of Artificial Sequence: Synthetic peptide
  XENP018294 vlCDR1
RASQSVSNDVA

SEQ ID NO: 18329 - protein, 7 aa, Artificial Sequence
  Description of Artificial Sequence: Synthetic peptide
  XENP018294 vlCDR2
YASHRYT

SEQ ID NO: 18330 - protein, 9 aa, Artificial Sequence
  Description of Artificial Sequence: Synthetic peptide
  XENP018294 vlCDR3
QQDYSSPRT

SEQ ID NO: 18331 - protein, 451 aa, Artificial Sequence
  Description of Artificial Sequence: Synthetic polypeptide
  XENP018295 1G6_H1.194_L1_IgG1_PVA_/S267K Heavy Chain
EVQLVESGGGLVKPGGSLRLSCAASGFTFSNYWMNWVRQAPGKGLEWVGEIRLKSNNYATHYAEPVKGRFTISRDDSKSTVYLQMNSLKTEDTAVYYCTRYYGDYGGYFDVWGAGTLVTVSSASTKGPSVFPLAPSSKSTSGGTAALGCLVKDYFPEPVTVSWNSGALTSGVHTFPAVLQSSGLYSLSSVVTVPSSSLGTQTYICNVNHKPSNTKVDKKVEPKSCDKTHTCPPCPAPPVAGPSVFLFPPKPKDTLMISRTPEVTCVVVDVKHEDPEVKFNWYVDGVEVHNAKTKPREEQYNSTYRVVSVLTVLHQDWLNGKEYKCKVSNKALPAPIEKTISKAKGQPREPQVYTLPPSREEMTKNQVSLTCLVKGFYPSDIAVEWESNGQPENNYKTTPPVLDSDGSFFLYSKLTVDKSRWQQGNVFSCSVMHEALHNHYTQKSLSLSPGK

SEQ ID NO: 18332 - protein, 122 aa, Artificial Sequence; identical to SEQ ID NO: 12773
  Description of Artificial Sequence: Synthetic polypeptide
  VH of XENP018295

SEQ ID NO: 18333 - protein, 5 aa, Artificial Sequence
  Description of Artificial Sequence: Synthetic peptide
  XENP018295 vhCDR1
NYWMN

SEQ ID NO: 18334 - protein, 19 aa, Artificial Sequence
  Description of Artificial Sequence: Synthetic peptide
  XENP018295 vhCDR2
EIRLKSNNYATHYAEPVKG

SEQ ID NO: 18335 - protein, 11 aa, Artificial Sequence
  Description of Artificial Sequence: Synthetic peptide
  XENP018295 vhCDR3
YYGDYGGYFDV

SEQ ID NO: 18336 - protein, 214 aa, Artificial Sequence; identical to SEQ ID NO: 16226
  Description of Artificial Sequence: Synthetic polypeptide
  XENP018295 1G6_H1.194_L1_IgG1_PVA_/S267K Light Chain

SEQ ID NO: 18337 - protein, 107 aa, Artificial Sequence; identical to SEQ ID NO: 10923
  Description of Artificial Sequence: Synthetic polypeptide
  VL of XENP018295

SEQ ID NO: 18338 - protein, 11 aa, Artificial Sequence
  Description of Artificial Sequence: Synthetic peptide
  XENP018295 vlCDR1
RASQSVSNDVA

SEQ ID NO: 18339 - protein, 7 aa, Artificial Sequence
  Description of Artificial Sequence: Synthetic peptide
  XENP018295 vlCDR2
YASHRYT

SEQ ID NO: 18340 - protein, 9 aa, Artificial Sequence
  Description of Artificial Sequence: Synthetic peptide
  XENP018295 vlCDR3
QQDYSSPRT

SEQ ID NO: 18341 - protein, 451 aa, Artificial Sequence
  Description of Artificial Sequence: Synthetic polypeptide
  XENP018296 1G6_H1.195_L1_IgG1_PVA_/S267K Heavy Chain
EVQLVESGGGLVKPGGSLRLSCAASGFTFSNYWMNWVRQAPGKGLEWVGEIRLKSNNYATHYAEPVKGRFTISRDDSKSTVYLQMNSLKTEDTAVYYCTRYYGHYGGYFDVWGAGTLVTVSSASTKGPSVFPLAPSSKSTSGGTAALGCLVKDYFPEPVTVSWNSGALTSGVHTFPAVLQSSGLYSLSSVVTVPSSSLGTQTYICNVNHKPSNTKVDKKVEPKSCDKTHTCPPCPAPPVAGPSVFLFPPKPKDTLMISRTPEVTCVVVDVKHEDPEVKFNWYVDGVEVHNAKTKPREEQYNSTYRVVSVLTVLHQDWLNGKEYKCKVSNKALPAPIEKTISKAKGQPREPQVYTLPPSREEMTKNQVSLTCLVKGFYPSDIAVEWESNGQPENNYKTTPPVLDSDGSFFLYSKLTVDKSRWQQGNVFSCSVMHEALHNHYTQKSLSLSPGK

SEQ ID NO: 18342 - protein, 122 aa, Artificial Sequence; identical to SEQ ID NO: 12782
  Description of Artificial Sequence: Synthetic polypeptide
  VH of XENP018296

SEQ ID NO: 18343 - protein, 5 aa, Artificial Sequence
  Description of Artificial Sequence: Synthetic peptide
  XENP018296 vhCDR1
NYWMN

SEQ ID NO: 18344 - protein, 19 aa, Artificial Sequence
  Description of Artificial Sequence: Synthetic peptide
  XENP018296 vhCDR2
EIRLKSNNYATHYAEPVKG

SEQ ID NO: 18345 - protein, 11 aa, Artificial Sequence
  Description of Artificial Sequence: Synthetic peptide
  XENP018296 vhCDR3
YYGHYGGYFDV

SEQ ID NO: 18346 - protein, 214 aa, Artificial Sequence; identical to SEQ ID NO: 16226
  Description of Artificial Sequence: Synthetic polypeptide
  XENP018296 1G6_H1.195_L1_IgG1_PVA_/S267K Light Chain

SEQ ID NO: 18347 - protein, 107 aa, Artificial Sequence; identical to SEQ ID NO: 10923
  Description of Artificial Sequence: Synthetic polypeptide
  VL of XENP018296

SEQ ID NO: 18348 - protein, 11 aa, Artificial Sequence
  Description of Artificial Sequence: Synthetic peptide
  XENP018296 vlCDR1
RASQSVSNDVA

SEQ ID NO: 18349 - protein, 7 aa, Artificial Sequence
  Description of Artificial Sequence: Synthetic peptide
  XENP018296 vlCDR2
YASHRYT

SEQ ID NO: 18350 - protein, 9 aa, Artificial Sequence
  Description of Artificial Sequence: Synthetic peptide
  XENP018296 vlCDR3
QQDYSSPRT

SEQ ID NO: 18351 - protein, 451 aa, Artificial Sequence
  Description of Artificial Sequence: Synthetic polypeptide
  XENP018301 1G6_H1.196_L1_IgG1_PVA_/S267K Heavy Chain
EVQLVESGGGLVKPGGSLRLSCAASGFTFSNYWMNWVRQAPGKGLEWVGEIRLKSNNYATHYAEPVKGRFTISRDDSKSTVYLQMNSLKTEDTAVYYCTRYYGEYGGYFDVWGAGTLVTVSSASTKGPSVFPLAPSSKSTSGGTAALGCLVKDYFPEPVTVSWNSGALTSGVHTFPAVLQSSGLYSLSSVVTVPSSSLGTQTYICNVNHKPSNTKVDKKVEPKSCDKTHTCPPCPAPPVAGPSVFLFPPKPKDTLMISRTPEVTCVVVDVKHEDPEVKFNWYVDGVEVHNAKTKPREEQYNSTYRVVSVLTVLHQDWLNGKEYKCKVSNKALPAPIEKTISKAKGQPREPQVYTLPPSREEMTKNQVSLTCLVKGFYPSDIAVEWESNGQPENNYKTTPPVLDSDGSFFLYSKLTVDKSRWQQGNVFSCSVMHEALHNHYTQKSLSLSPGK

SEQ ID NO: 18352 - protein, 122 aa, Artificial Sequence; identical to SEQ ID NO: 12791
  Description of Artificial Sequence: Synthetic polypeptide
  VH of XENP018301

SEQ ID NO: 18353 - protein, 5 aa, Artificial Sequence
  Description of Artificial Sequence: Synthetic peptide
  XENP018301 vhCDR1
NYWMN

SEQ ID NO: 18354 - protein, 19 aa, Artificial Sequence
  Description of Artificial Sequence: Synthetic peptide
  XENP018301 vhCDR2
EIRLKSNNYATHYAEPVKG

SEQ ID NO: 18355 - protein, 11 aa, Artificial Sequence
  Description of Artificial Sequence: Synthetic peptide
  XENP018301 vhCDR3
YYGEYGGYFDV

SEQ ID NO: 18356 - protein, 214 aa, Artificial Sequence; identical to SEQ ID NO: 16226
  Description of Artificial Sequence: Synthetic polypeptide
  XENP018301 1G6_H1.196_L1_IgG1_PVA_/S267K Light Chain

SEQ ID NO: 18357 - protein, 107 aa, Artificial Sequence; identical to SEQ ID NO: 10923
  Description of Artificial Sequence: Synthetic polypeptide
  VL of XENP018301

SEQ ID NO: 18358 - protein, 11 aa, Artificial Sequence
  Description of Artificial Sequence: Synthetic peptide
  XENP018301 vlCDR1
RASQSVSNDVA

SEQ ID NO: 18359 - protein, 7 aa, Artificial Sequence
  Description of Artificial Sequence: Synthetic peptide
  XENP018301 vlCDR2
YASHRYT

SEQ ID NO: 18360 - protein, 9 aa, Artificial Sequence
  Description of Artificial Sequence: Synthetic peptide
  XENP018301 vlCDR3
QQDYSSPRT

SEQ ID NO: 18361 - protein, 451 aa, Artificial Sequence
  Description of Artificial Sequence: Synthetic polypeptide
  XENP018302 1G6_H1.197_L1_IgG1_PVA_/S267K Heavy Chain
EVQLVESGGGLVKPGGSLRLSCAASGFTFSNYWMNWVRQAPGKGLEWVGEIRLKSNNYATHYAEPVKGRFTISRDDSKSTVYLQMNSLKTEDTAVYYCTRYYGSYGGYFDVWGAGTLVTVSSASTKGPSVFPLAPSSKSTSGGTAALGCLVKDYFPEPVTVSWNSGALTSGVHTFPAVLQSSGLYSLSSVVTVPSSSLGTQTYICNVNHKPSNTKVDKKVEPKSCDKTHTCPPCPAPPVAGPSVFLFPPKPKDTLMISRTPEVTCVVVDVKHEDPEVKFNWYVDGVEVHNAKTKPREEQYNSTYRVVSVLTVLHQDWLNGKEYKCKVSNKALPAPIEKTISKAKGQPREPQVYTLPPSREEMTKNQVSLTCLVKGFYPSDIAVEWESNGQPENNYKTTPPVLDSDGSFFLYSKLTVDKSRWQQGNVFSCSVMHEALHNHYTQKSLSLSPGK

SEQ ID NO: 18362 - protein, 122 aa, Artificial Sequence; identical to SEQ ID NO: 12800
  Description of Artificial Sequence: Synthetic polypeptide
  VH of XENP018302

SEQ ID NO: 18363 - protein, 5 aa, Artificial Sequence
  Description of Artificial Sequence: Synthetic peptide
  XENP018302 vhCDR1
NYWMN

SEQ ID NO: 18364 - protein, 19 aa, Artificial Sequence
  Description of Artificial Sequence: Synthetic peptide
  XENP018302 vhCDR2
EIRLKSNNYATHYAEPVKG

SEQ ID NO: 18365 - protein, 11 aa, Artificial Sequence
  Description of Artificial Sequence: Synthetic peptide
  XENP018302 vhCDR3
YYGSYGGYFDV

SEQ ID NO: 18366 - protein, 214 aa, Artificial Sequence; identical to SEQ ID NO: 16226
  Description of Artificial Sequence: Synthetic polypeptide
  XENP018302 1G6_H1.197_L1_IgG1_PVA_/S267K Light Chain

SEQ ID NO: 18367 - protein, 107 aa, Artificial Sequence; identical to SEQ ID NO: 10923
  Description of Artificial Sequence: Synthetic polypeptide
  VL of XENP018302

SEQ ID NO: 18368 - protein, 11 aa, Artificial Sequence
  Description of Artificial Sequence: Synthetic peptide
  XENP018302 vlCDR1
RASQSVSNDVA

SEQ ID NO: 18369 - protein, 7 aa, Artificial Sequence
  Description of Artificial Sequence: Synthetic peptide
  XENP018302 vlCDR2
YASHRYT

SEQ ID NO: 18370 - protein, 9 aa, Artificial Sequence
  Description of Artificial Sequence: Synthetic peptide
  XENP018302 vlCDR3
QQDYSSPRT

SEQ ID NO: 18371 - protein, 451 aa, Artificial Sequence
  Description of Artificial Sequence: Synthetic polypeptide
  XENP018303 1G6_H1.198_L1_IgG1_PVA_/S267K Heavy Chain
EVQLVESGGGLVKPGGSLRLSCAASGFTFSNYWMNWVRQAPGKGLEWVGEIRLKSNNYATHYAEPVKGRFTISRDDSKSTVYLQMNSLKTEDTAVYYCTRYYGRYGGYFDVWGAGTLVTVSSASTKGPSVFPLAPSSKSTSGGTAALGCLVKDYFPEPVTVSWNSGALTSGVHTFPAVLQSSGLYSLSSVVTVPSSSLGTQTYICNVNHKPSNTKVDKKVEPKSCDKTHTCPPCPAPPVAGPSVFLFPPKPKDTLMISRTPEVTCVVVDVKHEDPEVKFNWYVDGVEVHNAKTKPREEQYNSTYRVVSVLTVLHQDWLNGKEYKCKVSNKALPAPIEKTISKAKGQPREPQVYTLPPSREEMTKNQVSLTCLVKGFYPSDIAVEWESNGQPENNYKTTPPVLDSDGSFFLYSKLTVDKSRWQQGNVFSCSVMHEALHNHYTQKSLSLSPGK

SEQ ID NO: 18372 - protein, 122 aa, Artificial Sequence; identical to SEQ ID NO: 12809
  Description of Artificial Sequence: Synthetic polypeptide
  VH of XENP018303

SEQ ID NO: 18373 - protein, 5 aa, Artificial Sequence
  Description of Artificial Sequence: Synthetic peptide
  XENP018303 vhCDR1
NYWMN

SEQ ID NO: 18374 - protein, 19 aa, Artificial Sequence
  Description of Artificial Sequence: Synthetic peptide
  XENP018303 vhCDR2
EIRLKSNNYATHYAEPVKG

SEQ ID NO: 18375 - protein, 11 aa, Artificial Sequence
  Description of Artificial Sequence: Synthetic peptide
  XENP018303 vhCDR3
YYGRYGGYFDV

SEQ ID NO: 18376 - protein, 214 aa, Artificial Sequence; identical to SEQ ID NO: 16226
  Description of Artificial Sequence: Synthetic polypeptide
  XENP018303 1G6_H1.198_L1_IgG1_PVA_/S267K Light Chain

SEQ ID NO: 18377 - protein, 107 aa, Artificial Sequence; identical to SEQ ID NO: 10923
  Description of Artificial Sequence: Synthetic polypeptide
  VL of XENP018303

SEQ ID NO: 18378 - protein, 11 aa, Artificial Sequence
  Description of Artificial Sequence: Synthetic peptide
  XENP018303 vlCDR1
RASQSVSNDVA

SEQ ID NO: 18379 - protein, 7 aa, Artificial Sequence
  Description of Artificial Sequence: Synthetic peptide
  XENP018303 vlCDR2
YASHRYT

SEQ ID NO: 18380 - protein, 9 aa, Artificial Sequence
  Description of Artificial Sequence: Synthetic peptide
  XENP018303 vlCDR3
QQDYSSPRT

SEQ ID NO: 18381 - protein, 451 aa, Artificial Sequence
  Description of Artificial Sequence: Synthetic polypeptide
  XENP018304 1G6_H1.199_L1_IgG1_PVA_/S267K Heavy Chain
EVQLVESGGGLVKPGGSLRLSCAASGFTFSNYWMNWVRQAPGKGLEWVGEIRLKSNNYATHYAEPVKGRFTISRDDSKSTVYLQMNSLKTEDTAVYYCTRYYGLYGGYFDVWGAGTLVTVSSASTKGPSVFPLAPSSKSTSGGTAALGCLVKDYFPEPVTVSWNSGALTSGVHTFPAVLQSSGLYSLSSVVTVPSSSLGTQTYICNVNHKPSNTKVDKKVEPKSCDKTHTCPPCPAPPVAGPSVFLFPPKPKDTLMISRTPEVTCVVVDVKHEDPEVKFNWYVDGVEVHNAKTKPREEQYNSTYRVVSVLTVLHQDWLNGKEYKCKVSNKALPAPIEKTISKAKGQPREPQVYTLPPSREEMTKNQVSLTCLVKGFYPSDIAVEWESNGQPENNYKTTPPVLDSDGSFFLYSKLTVDKSRWQQGNVFSCSVMHEALHNHYTQKSLSLSPGK

SEQ ID NO: 18382 - protein, 122 aa, Artificial Sequence; identical to SEQ ID NO: 12818
  Description of Artificial Sequence: Synthetic polypeptide
  VH of XENP018304

SEQ ID NO: 18383 - protein, 5 aa, Artificial Sequence
  Description of Artificial Sequence: Synthetic peptide
  XENP018304 vhCDR1
NYWMN

SEQ ID NO: 18384 - protein, 19 aa, Artificial Sequence
  Description of Artificial Sequence: Synthetic peptide
  XENP018304 vhCDR2
EIRLKSNNYATHYAEPVKG

SEQ ID NO: 18385 - protein, 11 aa, Artificial Sequence
  Description of Artificial Sequence: Synthetic peptide
  XENP018304 vhCDR3
YYGLYGGYFDV

SEQ ID NO: 18386 - protein, 214 aa, Artificial Sequence; identical to SEQ ID NO: 16226
  Description of Artificial Sequence: Synthetic polypeptide
  XENP018304 1G6_H1.199_L1_IgG1_PVA_/S267K Light Chain

SEQ ID NO: 18387 - protein, 107 aa, Artificial Sequence; identical to SEQ ID NO: 10923
  Description of Artificial Sequence: Synthetic polypeptide
  VL of XENP018304

SEQ ID NO: 18388 - protein, 11 aa, Artificial Sequence
  Description of Artificial Sequence: Synthetic peptide
  XENP018304 vlCDR1
RASQSVSNDVA

SEQ ID NO: 18389 - protein, 7 aa, Artificial Sequence
  Description of Artificial Sequence: Synthetic peptide
  XENP018304 vlCDR2
YASHRYT

SEQ ID NO: 18390 - protein, 9 aa, Artificial Sequence
  Description of Artificial Sequence: Synthetic peptide
  XENP018304 vlCDR3
QQDYSSPRT

SEQ ID NO: 18391 - protein, 451 aa, Artificial Sequence
  Description of Artificial Sequence: Synthetic polypeptide
  XENP018305 1G6_H1.200_L1_IgG1_PVA_/S267K Heavy Chain
EVQLVESGGGLVKPGGSLRLSCAASGFTFSNYWMNWVRQAPGKGLEWVGEIRLKSNNYATHYAEPVKGRFTISRDDSKSTVYLQMNSLKTEDTAVYYCTRYYGTYGGYFDVWGAGTLVTVSSASTKGPSVFPLAPSSKSTSGGTAALGCLVKDYFPEPVTVSWNSGALTSGVHTFPAVLQSSGLYSLSSVVTVPSSSLGTQTYICNVNHKPSNTKVDKKVEPKSCDKTHTCPPCPAPPVAGPSVFLFPPKPKDTLMISRTPEVTCVVVDVKHEDPEVKFNWYVDGVEVHNAKTKPREEQYNSTYRVVSVLTVLHQDWLNGKEYKCKVSNKALPAPIEKTISKAKGQPREPQVYTLPPSREEMTKNQVSLTCLVKGFYPSDIAVEWESNGQPENNYKTTPPVLDSDGSFFLYSKLTVDKSRWQQGNVFSCSVMHEALHNHYTQKSLSLSPGK

SEQ ID NO: 18392 - protein, 122 aa, Artificial Sequence; identical to SEQ ID NO: 12827
  Description of Artificial Sequence: Synthetic polypeptide
  VH of XENP018305

SEQ ID NO: 18393 - protein, 5 aa, Artificial Sequence
  Description of Artificial Sequence: Synthetic peptide
  XENP018305 vhCDR1
NYWMN

SEQ ID NO: 18394 - protein, 19 aa, Artificial Sequence
  Description of Artificial Sequence: Synthetic peptide
  XENP018305 vhCDR2
EIRLKSNNYATHYAEPVKG

SEQ ID NO: 18395 - protein, 11 aa, Artificial Sequence
  Description of Artificial Sequence: Synthetic peptide
  XENP018305 vhCDR3
YYGTYGGYFDV

SEQ ID NO: 18396 - protein, 214 aa, Artificial Sequence; identical to SEQ ID NO: 16226
  Description of Artificial Sequence: Synthetic polypeptide
  XENP018305 1G6_H1.200_L1_IgG1_PVA_/S267K Light Chain

SEQ ID NO: 18397 - protein, 107 aa, Artificial Sequence; identical to SEQ ID NO: 10923
  Description of Artificial Sequence: Synthetic polypeptide
  VL of XENP018305

SEQ ID NO: 18398 - protein, 11 aa, Artificial Sequence
  Description of Artificial Sequence: Synthetic peptide
  XENP018305 vlCDR1
RASQSVSNDVA

SEQ ID NO: 18399 - protein, 7 aa, Artificial Sequence
  Description of Artificial Sequence: Synthetic peptide
  XENP018305 vlCDR2
YASHRYT

SEQ ID NO: 18400 - protein, 9 aa, Artificial Sequence
  Description of Artificial Sequence: Synthetic peptide
  XENP018305 vlCDR3
QQDYSSPRT

SEQ ID NO: 18401 - protein, 451 aa, Artificial Sequence
  Description of Artificial Sequence: Synthetic polypeptide
  XENP018306 1G6_H1.201_L1_IgG1_PVA_/S267K Heavy Chain
EVQLVESGGGLVKPGGSLRLSCAASGFTFSNYWMNWVRQAPGKGLEWVGEIRLKSNNYATHYAEPVKGRFTISRDDSKSTVYLQMNSLKTEDTAVYYCTRYYGGYGGYFDVWGAGTLVTVSSASTKGPSVFPLAPSSKSTSGGTAALGCLVKDYFPEPVTVSWNSGALTSGVHTFPAVLQSSGLYSLSSVVTVPSSSLGTQTYICNVNHKPSNTKVDKKVEPKSCDKTHTCPPCPAPPVAGPSVFLFPPKPKDTLMISRTPEVTCVVVDVKHEDPEVKFNWYVDGVEVHNAKTKPREEQYNSTYRVVSVLTVLHQDWLNGKEYKCKVSNKALPAPIEKTISKAKGQPREPQVYTLPPSREEMTKNQVSLTCLVKGFYPSDIAVEWESNGQPENNYKTTPPVLDSDGSFFLYSKLTVDKSRWQQGNVFSCSVMHEALHNHYTQKSLSLSPGK

SEQ ID NO: 18402 - protein, 122 aa, Artificial Sequence; identical to SEQ ID NO: 12836
  Description of Artificial Sequence: Synthetic polypeptide
  VH of XENP018306

SEQ ID NO: 18403 - protein, 5 aa, Artificial Sequence
  Description of Artificial Sequence: Synthetic peptide
  XENP018306 vhCDR1
NYWMN

SEQ ID NO: 18404 - protein, 19 aa, Artificial Sequence
  Description of Artificial Sequence: Synthetic peptide
  XENP018306 vhCDR2
EIRLKSNNYATHYAEPVKG

SEQ ID NO: 18405 - protein, 11 aa, Artificial Sequence
  Description of Artificial Sequence: Synthetic peptide
  XENP018306 vhCDR3
YYGGYGGYFDV

SEQ ID NO: 18406 - protein, 214 aa, Artificial Sequence; identical to SEQ ID NO: 16226
  Description of Artificial Sequence: Synthetic polypeptide
  XENP018306 1G6_H1.201_L1_IgG1_PVA_/S267K Light Chain

SEQ ID NO: 18407 - protein, 107 aa, Artificial Sequence; identical to SEQ ID NO: 10923
  Description of Artificial Sequence: Synthetic polypeptide
  VL of XENP018306

SEQ ID NO: 18408 - protein, 11 aa, Artificial Sequence
  Description of Artificial Sequence: Synthetic peptide
  XENP018306 vlCDR1
RASQSVSNDVA

SEQ ID NO: 18409 - protein, 7 aa, Artificial Sequence
  Description of Artificial Sequence: Synthetic peptide
  XENP018306 vlCDR2
YASHRYT

SEQ ID NO: 18410 - protein, 9 aa, Artificial Sequence
  Description of Artificial Sequence: Synthetic peptide
  XENP018306 vlCDR3
QQDYSSPRT

SEQ ID NO: 18411 - protein, 451 aa, Artificial Sequence
  Description of Artificial Sequence: Synthetic polypeptide
  XENP018307 1G6_H1.202_L1_IgG1_PVA_/S267K Heavy Chain
EVQLVESGGGLVKPGGSLRLSCAASGFTFSNYWMNWVRQAPGKGLEWVGEIRLKSNNYATHYAEPVKGRFTISRDDSKSTVYLQMNSLKTEDTAVYYCTRYYGFYGGYFDVWGAGTLVTVSSASTKGPSVFPLAPSSKSTSGGTAALGCLVKDYFPEPVTVSWNSGALTSGVHTFPAVLQSSGLYSLSSVVTVPSSSLGTQTYICNVNHKPSNTKVDKKVEPKSCDKTHTCPPCPAPPVAGPSVFLFPPKPKDTLMISRTPEVTCVVVDVKHEDPEVKFNWYVDGVEVHNAKTKPREEQYNSTYRVVSVLTVLHQDWLNGKEYKCKVSNKALPAPIEKTISKAKGQPREPQVYTLPPSREEMTKNQVSLTCLVKGFYPSDIAVEWESNGQPENNYKTTPPVLDSDGSFFLYSKLTVDKSRWQQGNVFSCSVMHEALHNHYTQKSLSLSPGK

SEQ ID NO: 18412 - protein, 122 aa, Artificial Sequence; identical to SEQ ID NO: 12845
  Description of Artificial Sequence: Synthetic polypeptide
  VH of XENP018307

SEQ ID NO: 18413 - protein, 5 aa, Artificial Sequence
  Description of Artificial Sequence: Synthetic peptide
  XENP018307 vhCDR1
NYWMN

SEQ ID NO: 18414 - protein, 19 aa, Artificial Sequence
  Description of Artificial Sequence: Synthetic peptide
  XENP018307 vhCDR2
EIRLKSNNYATHYAEPVKG

SEQ ID NO: 18415 - protein, 11 aa, Artificial Sequence
  Description of Artificial Sequence: Synthetic peptide
  XENP018307 vhCDR3
YYGFYGGYFDV

SEQ ID NO: 18416 - protein, 214 aa, Artificial Sequence; identical to SEQ ID NO: 16226
  Description of Artificial Sequence: Synthetic polypeptide
  XENP018307 1G6_H1.202_L1_IgG1_PVA_/S267K Light Chain

SEQ ID NO: 18417 - protein, 107 aa, Artificial Sequence; identical to SEQ ID NO: 10923
  Description of Artificial Sequence: Synthetic polypeptide
  VL of XENP018307

SEQ ID NO: 18418 - protein, 11 aa, Artificial Sequence
  Description of Artificial Sequence: Synthetic peptide
  XENP018307 vlCDR1
RASQSVSNDVA

SEQ ID NO: 18419 - protein, 7 aa, Artificial Sequence
  Description of Artificial Sequence: Synthetic peptide
  XENP018307 vlCDR2
YASHRYT

SEQ ID NO: 18420 - protein, 9 aa, Artificial Sequence
  Description of Artificial Sequence: Synthetic peptide
  XENP018307 vlCDR3
QQDYSSPRT

SEQ ID NO: 18421 - protein, 451 aa, Artificial Sequence
  Description of Artificial Sequence: Synthetic polypeptide
  XENP018308 1G6_H1.203_L1_IgG1_PVA_/S267K Heavy Chain
EVQLVESGGGLVKPGGSLRLSCAASGFTFSNYWMNWVRQAPGKGLEWVGEIRLKSNNYATHYAEPVKGRFTISRDDSKSTVYLQMNSLKTEDTAVYYCTRYYGNFGGYFDVWGAGTLVTVSSASTKGPSVFPLAPSSKSTSGGTAALGCLVKDYFPEPVTVSWNSGALTSGVHTFPAVLQSSGLYSLSSVVTVPSSSLGTQTYICNVNHKPSNTKVDKKVEPKSCDKTHTCPPCPAPPVAGPSVFLFPPKPKDTLMISRTPEVTCVVVDVKHEDPEVKFNWYVDGVEVHNAKTKPREEQYNSTYRVVSVLTVLHQDWLNGKEYKCKVSNKALPAPIEKTISKAKGQPREPQVYTLPPSREEMTKNQVSLTCLVKGFYPSDIAVEWESNGQPENNYKTTPPVLDSDGSFFLYSKLTVDKSRWQQGNVFSCSVMHEALHNHYTQKSLSLSPGK

SEQ ID NO: 18422 - protein, 122 aa, Artificial Sequence; identical to SEQ ID NO: 12854
  Description of Artificial Sequence: Synthetic polypeptide
  VH of XENP018308

SEQ ID NO: 18423 - protein, 5 aa, Artificial Sequence
  Description of Artificial Sequence: Synthetic peptide
  XENP018308 vhCDR1
NYWMN

SEQ ID NO: 18424 - protein, 19 aa, Artificial Sequence
  Description of Artificial Sequence: Synthetic peptide
  XENP018308 vhCDR2
EIRLKSNNYATHYAEPVKG

SEQ ID NO: 18425 - protein, 11 aa, Artificial Sequence
  Description of Artificial Sequence: Synthetic peptide
  XENP018308 vhCDR3
YYGNFGGYFDV

SEQ ID NO: 18426 - protein, 214 aa, Artificial Sequence; identical to SEQ ID NO: 16226
  Description of Artificial Sequence: Synthetic polypeptide
  XENP018308 1G6_H1.203_L1_IgG1_PVA_/S267K Light Chain

SEQ ID NO: 18427 - protein, 107 aa, Artificial Sequence; identical to SEQ ID NO: 10923
  Description of Artificial Sequence: Synthetic polypeptide
  VL of XENP018308

SEQ ID NO: 18428 - protein, 11 aa, Artificial Sequence
  Description of Artificial Sequence: Synthetic peptide
  XENP018308 vlCDR1
RASQSVSNDVA

SEQ ID NO: 18429 - protein, 7 aa, Artificial Sequence
  Description of Artificial Sequence: Synthetic peptide
  XENP018308 vlCDR2
YASHRYT

SEQ ID NO: 18430 - protein, 9 aa, Artificial Sequence
  Description of Artificial Sequence: Synthetic peptide
  XENP018308 vlCDR3
QQDYSSPRT

SEQ ID NO: 18431 - protein, 451 aa, Artificial Sequence
  Description of Artificial Sequence: Synthetic polypeptide
  XENP018309 1G6_H1.204_L1_IgG1_PVA_/S267K Heavy Chain
EVQLVESGGGLVKPGGSLRLSCAASGFTFSNYWMNWVRQAPGKGLEWVGEIRLKSNNYATHYAEPVKGRFTISRDDSKSTVYLQMNSLKTEDTAVYYCTRYYGNHGGYFDVWGAGTLVTVSSASTKGPSVFPLAPSSKSTSGGTAALGCLVKDYFPEPVTVSWNSGALTSGVHTFPAVLQSSGLYSLSSVVTVPSSSLGTQTYICNVNHKPSNTKVDKKVEPKSCDKTHTCPPCPAPPVAGPSVFLFPPKPKDTLMISRTPEVTCVVVDVKHEDPEVKFNWYVDGVEVHNAKTKPREEQYNSTYRVVSVLTVLHQDWLNGKEYKCKVSNKALPAPIEKTISKAKGQPREPQVYTLPPSREEMTKNQVSLTCLVKGFYPSDIAVEWESNGQPENNYKTTPPVLDSDGSFFLYSKLTVDKSRWQQGNVFSCSVMHEALHNHYTQKSLSLSPGK

SEQ ID NO: 18432 - protein, 122 aa, Artificial Sequence; identical to SEQ ID NO: 12863
  Description of Artificial Sequence: Synthetic polypeptide
  VH of XENP018309

SEQ ID NO: 18433 - protein, 5 aa, Artificial Sequence
  Description of Artificial Sequence: Synthetic peptide
  XENP018309 vhCDR1
NYWMN

SEQ ID NO: 18434 - protein, 19 aa, Artificial Sequence
  Description of Artificial Sequence: Synthetic peptide
  XENP018309 vhCDR2
EIRLKSNNYATHYAEPVKG

SEQ ID NO: 18435 - protein, 11 aa, Artificial Sequence
  Description of Artificial Sequence: Synthetic peptide
  XENP018309 vhCDR3
YYGNHGGYFDV

SEQ ID NO: 18436 - protein, 214 aa, Artificial Sequence; identical to SEQ ID NO: 16226
  Description of Artificial Sequence: Synthetic polypeptide
  XENP018309 1G6_H1.204_L1_IgG1_PVA_/S267K Light Chain

SEQ ID NO: 18437 - protein, 107 aa, Artificial Sequence; identical to SEQ ID NO: 10923
  Description of Artificial Sequence: Synthetic polypeptide
  VL of XENP018309

SEQ ID NO: 18438 - protein, 11 aa, Artificial Sequence
  Description of Artificial Sequence: Synthetic peptide
  XENP018309 vlCDR1
RASQSVSNDVA

SEQ ID NO: 18439 - protein, 7 aa, Artificial Sequence
  Description of Artificial Sequence: Synthetic peptide
  XENP018309 vlCDR2
YASHRYT

SEQ ID NO: 18440 - protein, 9 aa, Artificial Sequence
  Description of Artificial Sequence: Synthetic peptide
  XENP018309 vlCDR3
QQDYSSPRT

SEQ ID NO: 18441 - protein, 451 aa, Artificial Sequence
  Description of Artificial Sequence: Synthetic polypeptide
  XENP018310 1G6_H1.205_L1_IgG1_PVA_/S267K Heavy Chain
EVQLVESGGGLVKPGGSLRLSCAASGFTFSNYWMNWVRQAPGKGLEWVGEIRLKSNNYATHYAEPVKGRFTISRDDSKSTVYLQMNSLKTEDTAVYYCTRYYGNLGGYFDVWGAGTLVTVSSASTKGPSVFPLAPSSKSTSGGTAALGCLVKDYFPEPVTVSWNSGALTSGVHTFPAVLQSSGLYSLSSVVTVPSSSLGTQTYICNVNHKPSNTKVDKKVEPKSCDKTHTCPPCPAPPVAGPSVFLFPPKPKDTLMISRTPEVTCVVVDVKHEDPEVKFNWYVDGVEVHNAKTKPREEQYNSTYRVVSVLTVLHQDWLNGKEYKCKVSNKALPAPIEKTISKAKGQPREPQVYTLPPSREEMTKNQVSLTCLVKGFYPSDIAVEWESNGQPENNYKTTPPVLDSDGSFFLYSKLTVDKSRWQQGNVFSCSVMHEALHNHYTQKSLSLSPGK

SEQ ID NO: 18442 - protein, 122 aa, Artificial Sequence; identical to SEQ ID NO: 12872
  Description of Artificial Sequence: Synthetic polypeptide
  VH of XENP018310

SEQ ID NO: 18443 - protein, 5 aa, Artificial Sequence
  Description of Artificial Sequence: Synthetic peptide
  XENP018310 vhCDR1
NYWMN

SEQ ID NO: 18444 - protein, 19 aa, Artificial Sequence
  Description of Artificial Sequence: Synthetic peptide
  XENP018310 vhCDR2
EIRLKSNNYATHYAEPVKG

SEQ ID NO: 18445 - protein, 11 aa, Artificial Sequence
  Description of Artificial Sequence: Synthetic peptide
  XENP018310 vhCDR3
YYGNLGGYFDV

SEQ ID NO: 18446 - protein, 214 aa, Artificial Sequence; identical to SEQ ID NO: 16226
  Description of Artificial Sequence: Synthetic polypeptide
  XENP018310 1G6_H1.205_L1_IgG1_PVA_/S267K Light Chain

SEQ ID NO: 18447 - protein, 107 aa, Artificial Sequence; identical to SEQ ID NO: 10923
  Description of Artificial Sequence: Synthetic polypeptide
  VL of XENP018310

SEQ ID NO: 18448 - protein, 11 aa, Artificial Sequence
  Description of Artificial Sequence: Synthetic peptide
  XENP018310 vlCDR1
RASQSVSNDVA

SEQ ID NO: 18449 - protein, 7 aa, Artificial Sequence
  Description of Artificial Sequence: Synthetic peptide
  XENP018310 vlCDR2
YASHRYT

SEQ ID NO: 18450 - protein, 9 aa, Artificial Sequence
  Description of Artificial Sequence: Synthetic peptide
  XENP018310 vlCDR3
QQDYSSPRT

SEQ ID NO: 18451 - protein, 451 aa, Artificial Sequence
  Description of Artificial Sequence: Synthetic polypeptide
  XENP018311 1G6_H1.206_L1_IgG1_PVA_/S267K Heavy Chain
EVQLVESGGGLVKPGGSLRLSCAASGFTFSNYWMNWVRQAPGKGLEWVGEIRLKSNNYATHYAEPVKGRFTISRDDSKSTVYLQMNSLKTEDTAVYYCTRYYGNWGGYFDVWGAGTLVTVSSASTKGPSVFPLAPSSKSTSGGTAALGCLVKDYFPEPVTVSWNSGALTSGVHTFPAVLQSSGLYSLSSVVTVPSSSLGTQTYICNVNHKPSNTKVDKKVEPKSCDKTHTCPPCPAPPVAGPSVFLFPPKPKDTLMISRTPEVTCVVVDVKHEDPEVKFNWYVDGVEVHNAKTKPREEQYNSTYRVVSVLTVLHQDWLNGKEYKCKVSNKALPAPIEKTISKAKGQPREPQVYTLPPSREEMTKNQVSLTCLVKGFYPSDIAVEWESNGQPENNYKTTPPVLDSDGSFFLYSKLTVDKSRWQQGNVFSCSVMHEALHNHYTQKSLSLSPGK

SEQ ID NO: 18452 - protein, 122 aa, Artificial Sequence; identical to SEQ ID NO: 12881
  Description of Artificial Sequence: Synthetic polypeptide
  VH of XENP018311

SEQ ID NO: 18453 - protein, 5 aa, Artificial Sequence
  Description of Artificial Sequence: Synthetic peptide
  XENP018311 vhCDR1
NYWMN

SEQ ID NO: 18454 - protein, 19 aa, Artificial Sequence
  Description of Artificial Sequence: Synthetic peptide
  XENP018311 vhCDR2
EIRLKSNNYATHYAEPVKG

SEQ ID NO: 18455 - protein, 11 aa, Artificial Sequence
  Description of Artificial Sequence: Synthetic peptide
  XENP018311 vhCDR3
YYGNWGGYFDV

SEQ ID NO: 18456 - protein, 214 aa, Artificial Sequence; identical to SEQ ID NO: 16226
  Description of Artificial Sequence: Synthetic polypeptide
  XENP018311 1G6_H1.206_L1_IgG1_PVA_/S267K Light Chain

SEQ ID NO: 18457 - protein, 107 aa, Artificial Sequence; identical to SEQ ID NO: 10923
  Description of Artificial Sequence: Synthetic polypeptide
  VL of XENP018311

SEQ ID NO: 18458 - protein, 11 aa, Artificial Sequence
  Description of Artificial Sequence: Synthetic peptide
  XENP018311 vlCDR1
RASQSVSNDVA

SEQ ID NO: 18459 - protein, 7 aa, Artificial Sequence
  Description of Artificial Sequence: Synthetic peptide
  XENP018311 vlCDR2
YASHRYT

SEQ ID NO: 18460 - protein, 9 aa, Artificial Sequence
  Description of Artificial Sequence: Synthetic peptide
  XENP018311 vlCDR3
QQDYSSPRT

SEQ ID NO: 18461 - protein, 451 aa, Artificial Sequence
  Description of Artificial Sequence: Synthetic polypeptide
  XENP018312 1G6_H1.207_L1_IgG1_PVA_/S267K Heavy Chain
EVQLVESGGGLVKPGGSLRLSCAASGFTFSNYWMNWVRQAPGKGLEWVGEIRLKSNNYATHYAEPVKGRFTISRDDSKSTVYLQMNSLKTEDTAVYYCTRYYGNVGGYFDVWGAGTLVTVSSASTKGPSVFPLAPSSKSTSGGTAALGCLVKDYFPEPVTVSWNSGALTSGVHTFPAVLQSSGLYSLSSVVTVPSSSLGTQTYICNVNHKPSNTKVDKKVEPKSCDKTHTCPPCPAPPVAGPSVFLFPPKPKDTLMISRTPEVTCVVVDVKHEDPEVKFNWYVDGVEVHNAKTKPREEQYNSTYRVVSVLTVLHQDWLNGKEYKCKVSNKALPAPIEKTISKAKGQPREPQVYTLPPSREEMTKNQVSLTCLVKGFYPSDIAVEWESNGQPENNYKTTPPVLDSDGSFFLYSKLTVDKSRWQQGNVFSCSVMHEALHNHYTQKSLSLSPGK

SEQ ID NO: 18462 - protein, 122 aa, Artificial Sequence; identical to SEQ ID NO: 12890
  Description of Artificial Sequence: Synthetic polypeptide
  VH of XENP018312

SEQ ID NO: 18463 - protein, 5 aa, Artificial Sequence
  Description of Artificial Sequence: Synthetic peptide
  XENP018312 vhCDR1
NYWMN

SEQ ID NO: 18464 - protein, 19 aa, Artificial Sequence
  Description of Artificial Sequence: Synthetic peptide
  XENP018312 vhCDR2
EIRLKSNNYATHYAEPVKG

SEQ ID NO: 18465 - protein, 11 aa, Artificial Sequence
  Description of Artificial Sequence: Synthetic peptide
  XENP018312 vhCDR3
YYGNVGGYFDV

SEQ ID NO: 18466 - protein, 214 aa, Artificial Sequence; identical to SEQ ID NO: 16226
  Description of Artificial Sequence: Synthetic polypeptide
  XENP018312 1G6_H1.207_L1_IgG1_PVA_/S267K Light Chain

SEQ ID NO: 18467 - protein, 107 aa, Artificial Sequence; identical to SEQ ID NO: 10923
  Description of Artificial Sequence: Synthetic polypeptide
  VL of XENP018312

SEQ ID NO: 18468 - protein, 11 aa, Artificial Sequence
  Description of Artificial Sequence: Synthetic peptide
  XENP018312 vlCDR1
RASQSVSNDVA

SEQ ID NO: 18469 - protein, 7 aa, Artificial Sequence
  Description of Artificial Sequence: Synthetic peptide
  XENP018312 vlCDR2
YASHRYT

SEQ ID NO: 18470 - protein, 9 aa, Artificial Sequence
  Description of Artificial Sequence: Synthetic peptide
  XENP018312 vlCDR3
QQDYSSPRT

SEQ ID NO: 18471 - protein, 451 aa, Artificial Sequence
  Description of Artificial Sequence: Synthetic polypeptide
  XENP018313 1G6_H1.208_L1_IgG1_PVA_/S267K Heavy Chain
EVQLVESGGGLVKPGGSLRLSCAASGFTFSNYWMNWVRQAPGKGLEWVGEIRLKSNNYATHYAEPVKGRFTISRDDSKSTVYLQMNSLKTEDTAVYYCTRYYGNAGGYFDVWGAGTLVTVSSASTKGPSVFPLAPSSKSTSGGTAALGCLVKDYFPEPVTVSWNSGALTSGVHTFPAVLQSSGLYSLSSVVTVPSSSLGTQTYICNVNHKPSNTKVDKKVEPKSCDKTHTCPPCPAPPVAGPSVFLFPPKPKDTLMISRTPEVTCVVVDVKHEDPEVKFNWYVDGVEVHNAKTKPREEQYNSTYRVVSVLTVLHQDWLNGKEYKCKVSNKALPAPIEKTISKAKGQPREPQVYTLPPSREEMTKNQVSLTCLVKGFYPSDIAVEWESNGQPENNYKTTPPVLDSDGSFFLYSKLTVDKSRWQQGNVFSCSVMHEALHNHYTQKSLSLSPGK

SEQ ID NO: 18472 - protein, 122 aa, Artificial Sequence; identical to SEQ ID NO: 12899
  Description of Artificial Sequence: Synthetic polypeptide
  VH of XENP018313

SEQ ID NO: 18473 - protein, 5 aa, Artificial Sequence
  Description of Artificial Sequence: Synthetic peptide
  XENP018313 vhCDR1
NYWMN

SEQ ID NO: 18474 - protein, 19 aa, Artificial Sequence
  Description of Artificial Sequence: Synthetic peptide
  XENP018313 vhCDR2
EIRLKSNNYATHYAEPVKG

SEQ ID NO: 18475 - protein, 11 aa, Artificial Sequence
  Description of Artificial Sequence: Synthetic peptide
  XENP018313 vhCDR3
YYGNAGGYFDV

SEQ ID NO: 18476 - protein, 214 aa, Artificial Sequence; identical to SEQ ID NO: 16226
  Description of Artificial Sequence: Synthetic polypeptide
  XENP018313 1G6_H1.208_L1_IgG1_PVA_/S267K Light Chain

SEQ ID NO: 18477 - protein, 107 aa, Artificial Sequence; identical to SEQ ID NO: 10923
  Description of Artificial Sequence: Synthetic polypeptide
  VL of XENP018313

SEQ ID NO: 18478 - protein, 11 aa, Artificial Sequence
  Description of Artificial Sequence: Synthetic peptide
  XENP018313 vlCDR1
RASQSVSNDVA

SEQ ID NO: 18479 - protein, 7 aa, Artificial Sequence
  Description of Artificial Sequence: Synthetic peptide
  XENP018313 vlCDR2
YASHRYT

SEQ ID NO: 18480 - protein, 9 aa, Artificial Sequence
  Description of Artificial Sequence: Synthetic peptide
  XENP018313 vlCDR3
QQDYSSPRT

SEQ ID NO: 18481 - protein, 451 aa, Artificial Sequence
  Description of Artificial Sequence: Synthetic polypeptide
  XENP018314 1G6_H1.209_L1_IgG1_PVA_/S267K Heavy Chain
EVQLVESGGGLVKPGGSLRLSCAASGFTFSNYWMNWVRQAPGKGLEWVGEIRLKSNNYATHYAEPVKGRFTISRDDSKSTVYLQMNSLKTEDTAVYYCTRYYGNQGGYFDVWGAGTLVTVSSASTKGPSVFPLAPSSKSTSGGTAALGCLVKDYFPEPVTVSWNSGALTSGVHTFPAVLQSSGLYSLSSVVTVPSSSLGTQTYICNVNHKPSNTKVDKKVEPKSCDKTHTCPPCPAPPVAGPSVFLFPPKPKDTLMISRTPEVTCVVVDVKHEDPEVKFNWYVDGVEVHNAKTKPREEQYNSTYRVVSVLTVLHQDWLNGKEYKCKVSNKALPAPIEKTISKAKGQPREPQVYTLPPSREEMTKNQVSLTCLVKGFYPSDIAVEWESNGQPENNYKTTPPVLDSDGSFFLYSKLTVDKSRWQQGNVFSCSVMHEALHNHYTQKSLSLSPGK

SEQ ID NO: 18482 - protein, 122 aa, Artificial Sequence; identical to SEQ ID NO: 12908
  Description of Artificial Sequence: Synthetic polypeptide
  VH of XENP018314

SEQ ID NO: 18483 - protein, 5 aa, Artificial Sequence
  Description of Artificial Sequence: Synthetic peptide
  XENP018314 vhCDR1
NYWMN

SEQ ID NO: 18484 - protein, 19 aa, Artificial Sequence
  Description of Artificial Sequence: Synthetic peptide
  XENP018314 vhCDR2
EIRLKSNNYATHYAEPVKG

SEQ ID NO: 18485 - protein, 11 aa, Artificial Sequence
  Description of Artificial Sequence: Synthetic peptide
  XENP018314 vhCDR3
YYGNQGGYFDV

SEQ ID NO: 18486 - protein, 214 aa, Artificial Sequence; identical to SEQ ID NO: 16226
  Description of Artificial Sequence: Synthetic polypeptide
  XENP018314 1G6_H1.209_L1_IgG1_PVA_/S267K Light Chain

SEQ ID NO: 18487 - protein, 107 aa, Artificial Sequence; identical to SEQ ID NO: 10923
  Description of Artificial Sequence: Synthetic polypeptide
  VL of XENP018314

SEQ ID NO: 18488 - protein, 11 aa, Artificial Sequence
  Description of Artificial Sequence: Synthetic peptide
  XENP018314 vlCDR1
RASQSVSNDVA

SEQ ID NO: 18489 - protein, 7 aa, Artificial Sequence
  Description of Artificial Sequence: Synthetic peptide
  XENP018314 vlCDR2
YASHRYT

SEQ ID NO: 18490 - protein, 9 aa, Artificial Sequence
  Description of Artificial Sequence: Synthetic peptide
  XENP018314 vlCDR3
QQDYSSPRT

SEQ ID NO: 18491 - protein, 451 aa, Artificial Sequence
  Description of Artificial Sequence: Synthetic polypeptide
  XENP018315 1G6_H1.210_L1_IgG1_PVA_/S267K Heavy Chain
EVQLVESGGGLVKPGGSLRLSCAASGFTFSNYWMNWVRQAPGKGLEWVGEIRLKSNNYATHYAEPVKGRFTISRDDSKSTVYLQMNSLKTEDTAVYYCTRYYGNEGGYFDVWGAGTLVTVSSASTKGPSVFPLAPSSKSTSGGTAALGCLVKDYFPEPVTVSWNSGALTSGVHTFPAVLQSSGLYSLSSVVTVPSSSLGTQTYICNVNHKPSNTKVDKKVEPKSCDKTHTCPPCPAPPVAGPSVFLFPPKPKDTLMISRTPEVTCVVVDVKHEDPEVKFNWYVDGVEVHNAKTKPREEQYNSTYRVVSVLTVLHQDWLNGKEYKCKVSNKALPAPIEKTISKAKGQPREPQVYTLPPSREEMTKNQVSLTCLVKGFYPSDIAVEWESNGQPENNYKTTPPVLDSDGSFFLYSKLTVDKSRWQQGNVFSCSVMHEALHNHYTQKSLSLSPGK

SEQ ID NO: 18492 - protein, 122 aa, Artificial Sequence; identical to SEQ ID NO: 12917
  Description of Artificial Sequence: Synthetic polypeptide
  VH of XENP018315

SEQ ID NO: 18493 - protein, 5 aa, Artificial Sequence
  Description of Artificial Sequence: Synthetic peptide
  XENP018315 vhCDR1
NYWMN

SEQ ID NO: 18494 - protein, 19 aa, Artificial Sequence
  Description of Artificial Sequence: Synthetic peptide
  XENP018315 vhCDR2
EIRLKSNNYATHYAEPVKG

SEQ ID NO: 18495 - protein, 11 aa, Artificial Sequence
  Description of Artificial Sequence: Synthetic peptide
  XENP018315 vhCDR3
YYGNEGGYFDV

SEQ ID NO: 18496 - protein, 214 aa, Artificial Sequence; identical to SEQ ID NO: 16226
  Description of Artificial Sequence: Synthetic polypeptide
  XENP018315 1G6_H1.210_L1_IgG1_PVA_/S267K Light Chain

SEQ ID NO: 18497 - protein, 107 aa, Artificial Sequence; identical to SEQ ID NO: 10923
  Description of Artificial Sequence: Synthetic polypeptide
  VL of XENP018315

SEQ ID NO: 18498 - protein, 11 aa, Artificial Sequence
  Description of Artificial Sequence: Synthetic peptide
  XENP018315 vlCDR1
RASQSVSNDVA

SEQ ID NO: 18499 - protein, 7 aa, Artificial Sequence
  Description of Artificial Sequence: Synthetic peptide
  XENP018315 vlCDR2
YASHRYT

SEQ ID NO: 18500 - protein, 9 aa, Artificial Sequence
  Description of Artificial Sequence: Synthetic peptide
  XENP018315 vlCDR3
QQDYSSPRT

SEQ ID NO: 18501 - protein, 451 aa, Artificial Sequence
  Description of Artificial Sequence: Synthetic polypeptide
  XENP018316 1G6_H1.211_L1_IgG1_PVA_/S267K Heavy Chain
EVQLVESGGGLVKPGGSLRLSCAASGFTFSNYWMNWVRQAPGKGLEWVGEIRLKSNNYATHYAEPVKGRFTISRDDSKSTVYLQMNSLKTEDTAVYYCTRYYGNKGGYFDVWGAGTLVTVSSASTKGPSVFPLAPSSKSTSGGTAALGCLVKDYFPEPVTVSWNSGALTSGVHTFPAVLQSSGLYSLSSVVTVPSSSLGTQTYICNVNHKPSNTKVDKKVEPKSCDKTHTCPPCPAPPVAGPSVFLFPPKPKDTLMISRTPEVTCVVVDVKHEDPEVKFNWYVDGVEVHNAKTKPREEQYNSTYRVVSVLTVLHQDWLNGKEYKCKVSNKALPAPIEKTISKAKGQPREPQVYTLPPSREEMTKNQVSLTCLVKGFYPSDIAVEWESNGQPENNYKTTPPVLDSDGSFFLYSKLTVDKSRWQQGNVFSCSVMHEALHNHYTQKSLSLSPGK

SEQ ID NO: 18502 - protein, 122 aa, Artificial Sequence; identical to SEQ ID NO: 12926
  Description of Artificial Sequence: Synthetic polypeptide
  VH of XENP018316

SEQ ID NO: 18503 - protein, 5 aa, Artificial Sequence
  Description of Artificial Sequence: Synthetic peptide
  XENP018316 vhCDR1
NYWMN

SEQ ID NO: 18504 - protein, 19 aa, Artificial Sequence
  Description of Artificial Sequence: Synthetic peptide
  XENP018316 vhCDR2
EIRLKSNNYATHYAEPVKG

SEQ ID NO: 18505 - protein, 11 aa, Artificial Sequence
  Description of Artificial Sequence: Synthetic peptide
  XENP018316 vhCDR3
YYGNKGGYFDV

SEQ ID NO: 18506 - protein, 214 aa, Artificial Sequence; identical to SEQ ID NO: 16226
  Description of Artificial Sequence: Synthetic polypeptide
  XENP018316 1G6_H1.211_L1_IgG1_PVA_/S267K Light Chain

SEQ ID NO: 18507 - protein, 107 aa, Artificial Sequence; identical to SEQ ID NO: 10923
  Description of Artificial Sequence: Synthetic polypeptide
  VL of XENP018316

SEQ ID NO: 18508 - protein, 11 aa, Artificial Sequence
  Description of Artificial Sequence: Synthetic peptide
  XENP018316 vlCDR1
RASQSVSNDVA

SEQ ID NO: 18509 - protein, 7 aa, Artificial Sequence
  Description of Artificial Sequence: Synthetic peptide
  XENP018316 vlCDR2
YASHRYT

SEQ ID NO: 18510 - protein, 9 aa, Artificial Sequence
  Description of Artificial Sequence: Synthetic peptide
  XENP018316 vlCDR3
QQDYSSPRT

SEQ ID NO: 18511 - protein, 451 aa, Artificial Sequence
  Description of Artificial Sequence: Synthetic polypeptide
  XENP018317 1G6_H1.212_L1_IgG1_PVA_/S267K Heavy Chain
EVQLVESGGGLVKPGGSLRLSCAASGFTFSNYWMNWVRQAPGKGLEWVGEIRLKSNNYATHYAEPVKGRFTISRDDSKSTVYLQMNSLKTEDTAVYYCTRYYGNYAGYFDVWGAGTLVTVSSASTKGPSVFPLAPSSKSTSGGTAALGCLVKDYFPEPVTVSWNSGALTSGVHTFPAVLQSSGLYSLSSVVTVPSSSLGTQTYICNVNHKPSNTKVDKKVEPKSCDKTHTCPPCPAPPVAGPSVFLFPPKPKDTLMISRTPEVTCVVVDVKHEDPEVKFNWYVDGVEVHNAKTKPREEQYNSTYRVVSVLTVLHQDWLNGKEYKCKVSNKALPAPIEKTISKAKGQPREPQVYTLPPSREEMTKNQVSLTCLVKGFYPSDIAVEWESNGQPENNYKTTPPVLDSDGSFFLYSKLTVDKSRWQQGNVFSCSVMHEALHNHYTQKSLSLSPGK

SEQ ID NO: 18512 - protein, 122 aa, Artificial Sequence; identical to SEQ ID NO: 12935
  Description of Artificial Sequence: Synthetic polypeptide
  VH of XENP018317

SEQ ID NO: 18513 - protein, 5 aa, Artificial Sequence
  Description of Artificial Sequence: Synthetic peptide
  XENP018317 vhCDR1
NYWMN

SEQ ID NO: 18514 - protein, 19 aa, Artificial Sequence
  Description of Artificial Sequence: Synthetic peptide
  XENP018317 vhCDR2
EIRLKSNNYATHYAEPVKG

SEQ ID NO: 18515 - protein, 11 aa, Artificial Sequence
  Description of Artificial Sequence: Synthetic peptide
  XENP018317 vhCDR3
YYGNYAGYFDV

SEQ ID NO: 18516 - protein, 214 aa, Artificial Sequence; identical to SEQ ID NO: 16226
  Description of Artificial Sequence: Synthetic polypeptide
  XENP018317 1G6_H1.212_L1_IgG1_PVA_/S267K Light Chain

SEQ ID NO: 18517 - protein, 107 aa, Artificial Sequence; identical to SEQ ID NO: 10923
  Description of Artificial Sequence: Synthetic polypeptide
  VL of XENP018317

SEQ ID NO: 18518 - protein, 11 aa, Artificial Sequence
  Description of Artificial Sequence: Synthetic peptide
  XENP018317 vlCDR1
RASQSVSNDVA

SEQ ID NO: 18519 - protein, 7 aa, Artificial Sequence
  Description of Artificial Sequence: Synthetic peptide
  XENP018317 vlCDR2
YASHRYT

SEQ ID NO: 18520 - protein, 9 aa, Artificial Sequence
  Description of Artificial Sequence: Synthetic peptide
  XENP018317 vlCDR3
QQDYSSPRT

SEQ ID NO: 18521 - protein, 451 aa, Artificial Sequence
  Description of Artificial Sequence: Synthetic polypeptide
  XENP018318 1G6_H1.213_L1_IgG1_PVA_/S267K Heavy Chain
EVQLVESGGGLVKPGGSLRLSCAASGFTFSNYWMNWVRQAPGKGLEWVGEIRLKSNNYATHYAEPVKGRFTISRDDSKSTVYLQMNSLKTEDTAVYYCTRYYGNYQGYFDVWGAGTLVTVSSASTKGPSVFPLAPSSKSTSGGTAALGCLVKDYFPEPVTVSWNSGALTSGVHTFPAVLQSSGLYSLSSVVTVPSSSLGTQTYICNVNHKPSNTKVDKKVEPKSCDKTHTCPPCPAPPVAGPSVFLFPPKPKDTLMISRTPEVTCVVVDVKHEDPEVKFNWYVDGVEVHNAKTKPREEQYNSTYRVVSVLTVLHQDWLNGKEYKCKVSNKALPAPIEKTISKAKGQPREPQVYTLPPSREEMTKNQVSLTCLVKGFYPSDIAVEWESNGQPENNYKTTPPVLDSDGSFFLYSKLTVDKSRWQQGNVFSCSVMHEALHNHYTQKSLSLSPGK

SEQ ID NO: 18522 - protein, 122 aa, Artificial Sequence; identical to SEQ ID NO: 12944
  Description of Artificial Sequence: Synthetic polypeptide
  VH of XENP018318

SEQ ID NO: 18523 - protein, 5 aa, Artificial Sequence
  Description of Artificial Sequence: Synthetic peptide
  XENP018318 vhCDR1
NYWMN

SEQ ID NO: 18524 - protein, 19 aa, Artificial Sequence
  Description of Artificial Sequence: Synthetic peptide
  XENP018318 vhCDR2
EIRLKSNNYATHYAEPVKG

SEQ ID NO: 18525 - protein, 11 aa, Artificial Sequence
  Description of Artificial Sequence: Synthetic peptide
  XENP018318 vhCDR3
YYGNYQGYFDV

SEQ ID NO: 18526 - protein, 214 aa, Artificial Sequence; identical to SEQ ID NO: 16226
  Description of Artificial Sequence: Synthetic polypeptide
  XENP018318 1G6_H1.213_L1_IgG1_PVA_/S267K Light Chain

SEQ ID NO: 18527 - protein, 107 aa, Artificial Sequence; identical to SEQ ID NO: 10923
  Description of Artificial Sequence: Synthetic polypeptide
  VL of XENP018318

SEQ ID NO: 18528 - protein, 11 aa, Artificial Sequence
  Description of Artificial Sequence: Synthetic peptide
  XENP018318 vlCDR1
RASQSVSNDVA

SEQ ID NO: 18529 - protein, 7 aa, Artificial Sequence
  Description of Artificial Sequence: Synthetic peptide
  XENP018318 vlCDR2
YASHRYT

SEQ ID NO: 18530 - protein, 9 aa, Artificial Sequence
  Description of Artificial Sequence: Synthetic peptide
  XENP018318 vlCDR3
QQDYSSPRT

SEQ ID NO: 18531 - protein, 451 aa, Artificial Sequence
  Description of Artificial Sequence: Synthetic polypeptide
  XENP018319 1G6_H1.214_L1_IgG1_PVA_/S267K Heavy Chain
EVQLVESGGGLVKPGGSLRLSCAASGFTFSNYWMNWVRQAPGKGLEWVGEIRLKSNNYATHYAEPVKGRFTISRDDSKSTVYLQMNSLKTEDTAVYYCTRYYGNYHGYFDVWGAGTLVTVSSASTKGPSVFPLAPSSKSTSGGTAALGCLVKDYFPEPVTVSWNSGALTSGVHTFPAVLQSSGLYSLSSVVTVPSSSLGTQTYICNVNHKPSNTKVDKKVEPKSCDKTHTCPPCPAPPVAGPSVFLFPPKPKDTLMISRTPEVTCVVVDVKHEDPEVKFNWYVDGVEVHNAKTKPREEQYNSTYRVVSVLTVLHQDWLNGKEYKCKVSNKALPAPIEKTISKAKGQPREPQVYTLPPSREEMTKNQVSLTCLVKGFYPSDIAVEWESNGQPENNYKTTPPVLDSDGSFFLYSKLTVDKSRWQQGNVFSCSVMHEALHNHYTQKSLSLSPGK

SEQ ID NO: 18532 - protein, 122 aa, Artificial Sequence; identical to SEQ ID NO: 12953
  Description of Artificial Sequence: Synthetic polypeptide
  VH of XENP018319

SEQ ID NO: 18533 - protein, 5 aa, Artificial Sequence
  Description of Artificial Sequence: Synthetic peptide
  XENP018319 vhCDR1
NYWMN

SEQ ID NO: 18534 - protein, 19 aa, Artificial Sequence
  Description of Artificial Sequence: Synthetic peptide
  XENP018319 vhCDR2
EIRLKSNNYATHYAEPVKG

SEQ ID NO: 18535 - protein, 11 aa, Artificial Sequence
  Description of Artificial Sequence: Synthetic peptide
  XENP018319 vhCDR3
YYGNYHGYFDV

SEQ ID NO: 18536 - protein, 214 aa, Artificial Sequence; identical to SEQ ID NO: 16226
  Description of Artificial Sequence: Synthetic polypeptide
  XENP018319 1G6_H1.214_L1_IgG1_PVA_/S267K Light Chain

SEQ ID NO: 18537 - protein, 107 aa, Artificial Sequence; identical to SEQ ID NO: 10923
  Description of Artificial Sequence: Synthetic polypeptide
  VL of XENP018319

SEQ ID NO: 18538 - protein, 11 aa, Artificial Sequence
  Description of Artificial Sequence: Synthetic peptide
  XENP018319 vlCDR1
RASQSVSNDVA

SEQ ID NO: 18539 - protein, 7 aa, Artificial Sequence
  Description of Artificial Sequence: Synthetic peptide
  XENP018319 vlCDR2
YASHRYT

SEQ ID NO: 18540 - protein, 9 aa, Artificial Sequence
  Description of Artificial Sequence: Synthetic peptide
  XENP018319 vlCDR3
QQDYSSPRT

SEQ ID NO: 18541 - protein, 451 aa, Artificial Sequence
  Description of Artificial Sequence: Synthetic polypeptide
  XENP018320 1G6_H1.215_L1_IgG1_PVA_/S267K Heavy Chain
EVQLVESGGGLVKPGGSLRLSCAASGFTFSNYWMNWVRQAPGKGLEWVGEIRLKSNNYATHYAEPVKGRFTISRDDSKSTVYLQMNSLKTEDTAVYYCTRYYGNYDGYFDVWGAGTLVTVSSASTKGPSVFPLAPSSKSTSGGTAALGCLVKDYFPEPVTVSWNSGALTSGVHTFPAVLQSSGLYSLSSVVTVPSSSLGTQTYICNVNHKPSNTKVDKKVEPKSCDKTHTCPPCPAPPVAGPSVFLFPPKPKDTLMISRTPEVTCVVVDVKHEDPEVKFNWYVDGVEVHNAKTKPREEQYNSTYRVVSVLTVLHQDWLNGKEYKCKVSNKALPAPIEKTISKAKGQPREPQVYTLPPSREEMTKNQVSLTCLVKGFYPSDIAVEWESNGQPENNYKTTPPVLDSDGSFFLYSKLTVDKSRWQQGNVFSCSVMHEALHNHYTQKSLSLSPGK

SEQ ID NO: 18542 - protein, 122 aa, Artificial Sequence; identical to SEQ ID NO: 12962
  Description of Artificial Sequence: Synthetic polypeptide
  VH of XENP018320

SEQ ID NO: 18543 - protein, 5 aa, Artificial Sequence
  Description of Artificial Sequence: Synthetic peptide
  XENP018320 vhCDR1
NYWMN

SEQ ID NO: 18544 - protein, 19 aa, Artificial Sequence
  Description of Artificial Sequence: Synthetic peptide
  XENP018320 vhCDR2
EIRLKSNNYATHYAEPVKG

SEQ ID NO: 18545 - protein, 11 aa, Artificial Sequence
  Description of Artificial Sequence: Synthetic peptide
  XENP018320 vhCDR3
YYGNYDGYFDV

SEQ ID NO: 18546 - protein, 214 aa, Artificial Sequence; identical to SEQ ID NO: 16226
  Description of Artificial Sequence: Synthetic polypeptide
  XENP018320 1G6_H1.215_L1_IgG1_PVA_/S267K Light Chain

SEQ ID NO: 18547 - protein, 107 aa, Artificial Sequence; identical to SEQ ID NO: 10923
  Description of Artificial Sequence: Synthetic polypeptide
  VL of XENP018320

SEQ ID NO: 18548 - protein, 11 aa, Artificial Sequence
  Description of Artificial Sequence: Synthetic peptide
  XENP018320 vlCDR1
RASQSVSNDVA

SEQ ID NO: 18549 - protein, 7 aa, Artificial Sequence
  Description of Artificial Sequence: Synthetic peptide
  XENP018320 vlCDR2
YASHRYT

SEQ ID NO: 18550 - protein, 9 aa, Artificial Sequence
  Description of Artificial Sequence: Synthetic peptide
  XENP018320 vlCDR3
QQDYSSPRT

SEQ ID NO: 18551 - protein, 451 aa, Artificial Sequence
  Description of Artificial Sequence: Synthetic polypeptide
  XENP018321 1G6_H1.216_L1_IgG1_PVA_/S267K Heavy Chain
EVQLVESGGGLVKPGGSLRLSCAASGFTFSNYWMNWVRQAPGKGLEWVGEIRLKSNNYATHYAEPVKGRFTISRDDSKSTVYLQMNSLKTEDTAVYYCTRYYGNYKGYFDVWGAGTLVTVSSASTKGPSVFPLAPSSKSTSGGTAALGCLVKDYFPEPVTVSWNSGALTSGVHTFPAVLQSSGLYSLSSVVTVPSSSLGTQTYICNVNHKPSNTKVDKKVEPKSCDKTHTCPPCPAPPVAGPSVFLFPPKPKDTLMISRTPEVTCVVVDVKHEDPEVKFNWYVDGVEVHNAKTKPREEQYNSTYRVVSVLTVLHQDWLNGKEYKCKVSNKALPAPIEKTISKAKGQPREPQVYTLPPSREEMTKNQVSLTCLVKGFYPSDIAVEWESNGQPENNYKTTPPVLDSDGSFFLYSKLTVDKSRWQQGNVFSCSVMHEALHNHYTQKSLSLSPGK

SEQ ID NO: 18552 - protein, 122 aa, Artificial Sequence; identical to SEQ ID NO: 12971
  Description of Artificial Sequence: Synthetic polypeptide
  VH of XENP018321

SEQ ID NO: 18553 - protein, 5 aa, Artificial Sequence
  Description of Artificial Sequence: Synthetic peptide
  XENP018321 vhCDR1
NYWMN

SEQ ID NO: 18554 - protein, 19 aa, Artificial Sequence
  Description of Artificial Sequence: Synthetic peptide
  XENP018321 vhCDR2
EIRLKSNNYATHYAEPVKG

SEQ ID NO: 18555 - protein, 11 aa, Artificial Sequence
  Description of Artificial Sequence: Synthetic peptide
  XENP018321 vhCDR3
YYGNYKGYFDV

SEQ ID NO: 18556 - protein, 214 aa, Artificial Sequence; identical to SEQ ID NO: 16226
  Description of Artificial Sequence: Synthetic polypeptide
  XENP018321 1G6_H1.216_L1_IgG1_PVA_/S267K Light Chain

SEQ ID NO: 18557 - protein, 107 aa, Artificial Sequence; identical to SEQ ID NO: 10923
  Description of Artificial Sequence: Synthetic polypeptide
  VL of XENP018321

SEQ ID NO: 18558 - protein, 11 aa, Artificial Sequence
  Description of Artificial Sequence: Synthetic peptide
  XENP018321 vlCDR1
RASQSVSNDVA

SEQ ID NO: 18559 - protein, 7 aa, Artificial Sequence
  Description of Artificial Sequence: Synthetic peptide
  XENP018321 vlCDR2
YASHRYT

SEQ ID NO: 18560 - protein, 9 aa, Artificial Sequence
  Description of Artificial Sequence: Synthetic peptide
  XENP018321 vlCDR3
QQDYSSPRT

SEQ ID NO: 18561 - protein, 451 aa, Artificial Sequence
  Description of Artificial Sequence: Synthetic polypeptide
  XENP018322 1G6_H1.217_L1_IgG1_PVA_/S267K Heavy Chain
EVQLVESGGGLVKPGGSLRLSCAASGFTFSNYWMNWVRQAPGKGLEWVGEIRLKSNNYATHYAEPVKGRFTISRDDSKSTVYLQMNSLKTEDTAVYYCTRYYGNYLGYFDVWGAGTLVTVSSASTKGPSVFPLAPSSKSTSGGTAALGCLVKDYFPEPVTVSWNSGALTSGVHTFPAVLQSSGLYSLSSVVTVPSSSLGTQTYICNVNHKPSNTKVDKKVEPKSCDKTHTCPPCPAPPVAGPSVFLFPPKPKDTLMISRTPEVTCVVVDVKHEDPEVKFNWYVDGVEVHNAKTKPREEQYNSTYRVVSVLTVLHQDWLNGKEYKCKVSNKALPAPIEKTISKAKGQPREPQVYTLPPSREEMTKNQVSLTCLVKGFYPSDIAVEWESNGQPENNYKTTPPVLDSDGSFFLYSKLTVDKSRWQQGNVFSCSVMHEALHNHYTQKSLSLSPGK

SEQ ID NO: 18562 - protein, 122 aa, Artificial Sequence; identical to SEQ ID NO: 12980
  Description of Artificial Sequence: Synthetic polypeptide
  VH of XENP018322

SEQ ID NO: 18563 - protein, 5 aa, Artificial Sequence
  Description of Artificial Sequence: Synthetic peptide
  XENP018322 vhCDR1
NYWMN

SEQ ID NO: 18564 - protein, 19 aa, Artificial Sequence
  Description of Artificial Sequence: Synthetic peptide
  XENP018322 vhCDR2
EIRLKSNNYATHYAEPVKG

SEQ ID NO: 18565 - protein, 11 aa, Artificial Sequence
  Description of Artificial Sequence: Synthetic peptide
  XENP018322 vhCDR3
YYGNYLGYFDV

SEQ ID NO: 18566 - protein, 214 aa, Artificial Sequence; identical to SEQ ID NO: 16226
  Description of Artificial Sequence: Synthetic polypeptide
  XENP018322 1G6_H1.217_L1_IgG1_PVA_/S267K Light Chain

SEQ ID NO: 18567 - protein, 107 aa, Artificial Sequence; identical to SEQ ID NO: 10923
  Description of Artificial Sequence: Synthetic polypeptide
  VL of XENP018322

SEQ ID NO: 18568 - protein, 11 aa, Artificial Sequence
  Description of Artificial Sequence: Synthetic peptide
  XENP018322 vlCDR1
RASQSVSNDVA

SEQ ID NO: 18569 - protein, 7 aa, Artificial Sequence
  Description of Artificial Sequence: Synthetic peptide
  XENP018322 vlCDR2
YASHRYT

SEQ ID NO: 18570 - protein, 9 aa, Artificial Sequence
  Description of Artificial Sequence: Synthetic peptide
  XENP018322 vlCDR3
QQDYSSPRT

SEQ ID NO: 18571 - protein, 451 aa, Artificial Sequence
  Description of Artificial Sequence: Synthetic polypeptide
  XENP018323 1G6_H1.218_L1_IgG1_PVA_/S267K Heavy Chain
EVQLVESGGGLVKPGGSLRLSCAASGFTFSNYWMNWVRQAPGKGLEWVGEIRLKSNNYATHYAEPVKGRFTISRDDSKSTVYLQMNSLKTEDTAVYYCTRYYGNYFGYFDVWGAGTLVTVSSASTKGPSVFPLAPSSKSTSGGTAALGCLVKDYFPEPVTVSWNSGALTSGVHTFPAVLQSSGLYSLSSVVTVPSSSLGTQTYICNVNHKPSNTKVDKKVEPKSCDKTHTCPPCPAPPVAGPSVFLFPPKPKDTLMISRTPEVTCVVVDVKHEDPEVKFNWYVDGVEVHNAKTKPREEQYNSTYRVVSVLTVLHQDWLNGKEYKCKVSNKALPAPIEKTISKAKGQPREPQVYTLPPSREEMTKNQVSLTCLVKGFYPSDIAVEWESNGQPENNYKTTPPVLDSDGSFFLYSKLTVDKSRWQQGNVFSCSVMHEALHNHYTQKSLSLSPGK

SEQ ID NO: 18572 - protein, 122 aa, Artificial Sequence; identical to SEQ ID NO: 12989
  Description of Artificial Sequence: Synthetic polypeptide
  VH of XENP018323

SEQ ID NO: 18573 - protein, 5 aa, Artificial Sequence
  Description of Artificial Sequence: Synthetic peptide
  XENP018323 vhCDR1
NYWMN

SEQ ID NO: 18574 - protein, 19 aa, Artificial Sequence
  Description of Artificial Sequence: Synthetic peptide
  XENP018323 vhCDR2
EIRLKSNNYATHYAEPVKG

SEQ ID NO: 18575 - protein, 11 aa, Artificial Sequence
  Description of Artificial Sequence: Synthetic peptide
  XENP018323 vhCDR3
YYGNYFGYFDV

SEQ ID NO: 18576 - protein, 214 aa, Artificial Sequence; identical to SEQ ID NO: 16226
  Description of Artificial Sequence: Synthetic polypeptide
  XENP018323 1G6_H1.218_L1_IgG1_PVA_/S267K Light Chain

SEQ ID NO: 18577 - protein, 107 aa, Artificial Sequence; identical to SEQ ID NO: 10923
  Description of Artificial Sequence: Synthetic polypeptide
  VL of XENP018323

SEQ ID NO: 18578 - protein, 11 aa, Artificial Sequence
  Description of Artificial Sequence: Synthetic peptide
  XENP018323 vlCDR1
RASQSVSNDVA

SEQ ID NO: 18579 - protein, 7 aa, Artificial Sequence
  Description of Artificial Sequence: Synthetic peptide
  XENP018323 vlCDR2
YASHRYT

SEQ ID NO: 18580 - protein, 9 aa, Artificial Sequence
  Description of Artificial Sequence: Synthetic peptide
  XENP018323 vlCDR3
QQDYSSPRT

SEQ ID NO: 18581 - protein, 451 aa, Artificial Sequence
  Description of Artificial Sequence: Synthetic polypeptide
  XENP018324 1G6_H1.219_L1_IgG1_PVA_/S267K Heavy Chain
EVQLVESGGGLVKPGGSLRLSCAASGFTFSNYWMNWVRQAPGKGLEWVGEIRLKSNNYATHYAEPVKGRFTISRDDSKSTVYLQMNSLKTEDTAVYYCTRYYGNYGAYFDVWGAGTLVTVSSASTKGPSVFPLAPSSKSTSGGTAALGCLVKDYFPEPVTVSWNSGALTSGVHTFPAVLQSSGLYSLSSVVTVPSSSLGTQTYICNVNHKPSNTKVDKKVEPKSCDKTHTCPPCPAPPVAGPSVFLFPPKPKDTLMISRTPEVTCVVVDVKHEDPEVKFNWYVDGVEVHNAKTKPREEQYNSTYRVVSVLTVLHQDWLNGKEYKCKVSNKALPAPIEKTISKAKGQPREPQVYTLPPSREEMTKNQVSLTCLVKGFYPSDIAVEWESNGQPENNYKTTPPVLDSDGSFFLYSKLTVDKSRWQQGNVFSCSVMHEALHNHYTQKSLSLSPGK

SEQ ID NO: 18582 - protein, 122 aa, Artificial Sequence; identical to SEQ ID NO: 12998
  Description of Artificial Sequence: Synthetic polypeptide
  VH of XENP018324

SEQ ID NO: 18583 - protein, 5 aa, Artificial Sequence
  Description of Artificial Sequence: Synthetic peptide
  XENP018324 vhCDR1
NYWMN

SEQ ID NO: 18584 - protein, 19 aa, Artificial Sequence
  Description of Artificial Sequence: Synthetic peptide
  XENP018324 vhCDR2
EIRLKSNNYATHYAEPVKG

SEQ ID NO: 18585 - protein, 11 aa, Artificial Sequence
  Description of Artificial Sequence: Synthetic peptide
  XENP018324 vhCDR3
YYGNYGAYFDV

SEQ ID NO: 18586 - protein, 214 aa, Artificial Sequence; identical to SEQ ID NO: 16226
  Description of Artificial Sequence: Synthetic polypeptide
  XENP018324 1G6_H1.219_L1_IgG1_PVA_/S267K Light Chain

SEQ ID NO: 18587 - protein, 107 aa, Artificial Sequence; identical to SEQ ID NO: 10923
  Description of Artificial Sequence: Synthetic polypeptide
  VL of XENP018324

SEQ ID NO: 18588 - protein, 11 aa, Artificial Sequence
  Description of Artificial Sequence: Synthetic peptide
  XENP018324 vlCDR1
RASQSVSNDVA

SEQ ID NO: 18589 - protein, 7 aa, Artificial Sequence
  Description of Artificial Sequence: Synthetic peptide
  XENP018324 vlCDR2
YASHRYT

SEQ ID NO: 18590 - protein, 9 aa, Artificial Sequence
  Description of Artificial Sequence: Synthetic peptide
  XENP018324 vlCDR3
QQDYSSPRT

SEQ ID NO: 18591 - protein, 451 aa, Artificial Sequence
  Description of Artificial Sequence: Synthetic polypeptide
  XENP018325 1G6_H1.220_L1_IgG1_PVA_/S267K Heavy Chain
EVQLVESGGGLVKPGGSLRLSCAASGFTFSNYWMNWVRQAPGKGLEWVGEIRLKSNNYATHYAEPVKGRFTISRDDSKSTVYLQMNSLKTEDTAVYYCTRYYGNYGSYFDVWGAGTLVTVSSASTKGPSVFPLAPSSKSTSGGTAALGCLVKDYFPEPVTVSWNSGALTSGVHTFPAVLQSSGLYSLSSVVTVPSSSLGTQTYICNVNHKPSNTKVDKKVEPKSCDKTHTCPPCPAPPVAGPSVFLFPPKPKDTLMISRTPEVTCVVVDVKHEDPEVKFNWYVDGVEVHNAKTKPREEQYNSTYRVVSVLTVLHQDWLNGKEYKCKVSNKALPAPIEKTISKAKGQPREPQVYTLPPSREEMTKNQVSLTCLVKGFYPSDIAVEWESNGQPENNYKTTPPVLDSDGSFFLYSKLTVDKSRWQQGNVFSCSVMHEALHNHYTQKSLSLSPGK

SEQ ID NO: 18592 - protein, 122 aa, Artificial Sequence; identical to SEQ ID NO: 13007
  Description of Artificial Sequence: Synthetic polypeptide
  VH of XENP018325

SEQ ID NO: 18593 - protein, 5 aa, Artificial Sequence
  Description of Artificial Sequence: Synthetic peptide
  XENP018325 vhCDR1
NYWMN

SEQ ID NO: 18594 - protein, 19 aa, Artificial Sequence
  Description of Artificial Sequence: Synthetic peptide
  XENP018325 vhCDR2
EIRLKSNNYATHYAEPVKG

SEQ ID NO: 18595 - protein, 11 aa, Artificial Sequence
  Description of Artificial Sequence: Synthetic peptide
  XENP018325 vhCDR3
YYGNYGSYFDV

SEQ ID NO: 18596 - protein, 214 aa, Artificial Sequence; identical to SEQ ID NO: 16226
  Description of Artificial Sequence: Synthetic polypeptide
  XENP018325 1G6_H1.220_L1_IgG1_PVA_/S267K Light Chain

SEQ ID NO: 18597 - protein, 107 aa, Artificial Sequence; identical to SEQ ID NO: 10923
  Description of Artificial Sequence: Synthetic polypeptide
  VL of XENP018325

SEQ ID NO: 18598 - protein, 11 aa, Artificial Sequence
  Description of Artificial Sequence: Synthetic peptide
  XENP018325 vlCDR1
RASQSVSNDVA

SEQ ID NO: 18599 - protein, 7 aa, Artificial Sequence
  Description of Artificial Sequence: Synthetic peptide
  XENP018325 vlCDR2
YASHRYT

SEQ ID NO: 18600 - protein, 9 aa, Artificial Sequence
  Description of Artificial Sequence: Synthetic peptide
  XENP018325 vlCDR3
QQDYSSPRT

SEQ ID NO: 18601 - protein, 451 aa, Artificial Sequence
  Description of Artificial Sequence: Synthetic polypeptide
  XENP018326 1G6_H1.221_L1_IgG1_PVA_/S267K Heavy Chain
EVQLVESGGGLVKPGGSLRLSCAASGFTFSNYWMNWVRQAPGKGLEWVGEIRLKSNNYATHYAEPVKGRFTISRDDSKSTVYLQMNSLKTEDTAVYYCTRYYGNYGTYFDVWGAGTLVTVSSASTKGPSVFPLAPSSKSTSGGTAALGCLVKDYFPEPVTVSWNSGALTSGVHTFPAVLQSSGLYSLSSVVTVPSSSLGTQTYICNVNHKPSNTKVDKKVEPKSCDKTHTCPPCPAPPVAGPSVFLFPPKPKDTLMISRTPEVTCVVVDVKHEDPEVKFNWYVDGVEVHNAKTKPREEQYNSTYRVVSVLTVLHQDWLNGKEYKCKVSNKALPAPIEKTISKAKGQPREPQVYTLPPSREEMTKNQVSLTCLVKGFYPSDIAVEWESNGQPENNYKTTPPVLDSDGSFFLYSKLTVDKSRWQQGNVFSCSVMHEALHNHYTQKSLSLSPGK

SEQ ID NO: 18602 - protein, 122 aa, Artificial Sequence; identical to SEQ ID NO: 13016
  Description of Artificial Sequence: Synthetic polypeptide
  VH of XENP018326

SEQ ID NO: 18603 - protein, 5 aa, Artificial Sequence
  Description of Artificial Sequence: Synthetic peptide
  XENP018326 vhCDR1
NYWMN

SEQ ID NO: 18604 - protein, 19 aa, Artificial Sequence
  Description of Artificial Sequence: Synthetic peptide
  XENP018326 vhCDR2
EIRLKSNNYATHYAEPVKG

SEQ ID NO: 18605 - protein, 11 aa, Artificial Sequence
  Description of Artificial Sequence: Synthetic peptide
  XENP018326 vhCDR3
YYGNYGTYFDV

SEQ ID NO: 18606 - protein, 214 aa, Artificial Sequence; identical to SEQ ID NO: 16226
  Description of Artificial Sequence: Synthetic polypeptide
  XENP018326 1G6_H1.221_L1_IgG1_PVA_/S267K Light Chain

SEQ ID NO: 18607 - protein, 107 aa, Artificial Sequence; identical to SEQ ID NO: 10923
  Description of Artificial Sequence: Synthetic polypeptide
  VL of XENP018326

SEQ ID NO: 18608 - protein, 11 aa, Artificial Sequence
  Description of Artificial Sequence: Synthetic peptide
  XENP018326 vlCDR1
RASQSVSNDVA

SEQ ID NO: 18609 - protein, 7 aa, Artificial Sequence
  Description of Artificial Sequence: Synthetic peptide
  XENP018326 vlCDR2
YASHRYT

SEQ ID NO: 18610 - protein, 9 aa, Artificial Sequence
  Description of Artificial Sequence: Synthetic peptide
  XENP018326 vlCDR3
QQDYSSPRT

SEQ ID NO: 18611 - protein, 451 aa, Artificial Sequence
  Description of Artificial Sequence: Synthetic polypeptide
  XENP018327 1G6_H1.222_L1_IgG1_PVA_/S267K Heavy Chain
EVQLVESGGGLVKPGGSLRLSCAASGFTFSNYWMNWVRQAPGKGLEWVGEIRLKSNNYATHYAEPVKGRFTISRDDSKSTVYLQMNSLKTEDTAVYYCTRYYGNYGNYFDVWGAGTLVTVSSASTKGPSVFPLAPSSKSTSGGTAALGCLVKDYFPEPVTVSWNSGALTSGVHTFPAVLQSSGLYSLSSVVTVPSSSLGTQTYICNVNHKPSNTKVDKKVEPKSCDKTHTCPPCPAPPVAGPSVFLFPPKPKDTLMISRTPEVTCVVVDVKHEDPEVKFNWYVDGVEVHNAKTKPREEQYNSTYRVVSVLTVLHQDWLNGKEYKCKVSNKALPAPIEKTISKAKGQPREPQVYTLPPSREEMTKNQVSLTCLVKGFYPSDIAVEWESNGQPENNYKTTPPVLDSDGSFFLYSKLTVDKSRWQQGNVFSCSVMHEALHNHYTQKSLSLSPGK

SEQ ID NO: 18612 - protein, 122 aa, Artificial Sequence; identical to SEQ ID NO: 13025
  Description of Artificial Sequence: Synthetic polypeptide
  VH of XENP018327

SEQ ID NO: 18613 - protein, 5 aa, Artificial Sequence
  Description of Artificial Sequence: Synthetic peptide
  XENP018327 vhCDR1
NYWMN

SEQ ID NO: 18614 - protein, 19 aa, Artificial Sequence
  Description of Artificial Sequence: Synthetic peptide
  XENP018327 vhCDR2
EIRLKSNNYATHYAEPVKG

SEQ ID NO: 18615 - protein, 11 aa, Artificial Sequence
  Description of Artificial Sequence: Synthetic peptide
  XENP018327 vhCDR3
YYGNYGNYFDV

SEQ ID NO: 18616 - protein, 214 aa, Artificial Sequence; identical to SEQ ID NO: 16226
  Description of Artificial Sequence: Synthetic polypeptide
  XENP018327 1G6_H1.222_L1_IgG1_PVA_/S267K Light Chain

SEQ ID NO: 18617 - protein, 107 aa, Artificial Sequence; identical to SEQ ID NO: 10923
  Description of Artificial Sequence: Synthetic polypeptide
  VL of XENP018327

SEQ ID NO: 18618 - protein, 11 aa, Artificial Sequence
  Description of Artificial Sequence: Synthetic peptide
  XENP018327 vlCDR1
RASQSVSNDVA

SEQ ID NO: 18619 - protein, 7 aa, Artificial Sequence
  Description of Artificial Sequence: Synthetic peptide
  XENP018327 vlCDR2
YASHRYT

SEQ ID NO: 18620 - protein, 9 aa, Artificial Sequence
  Description of Artificial Sequence: Synthetic peptide
  XENP018327 vlCDR3
QQDYSSPRT

SEQ ID NO: 18621 - protein, 451 aa, Artificial Sequence
  Description of Artificial Sequence: Synthetic polypeptide
  XENP018328 1G6_H1.223_L1_IgG1_PVA_/S267K Heavy Chain
EVQLVESGGGLVKPGGSLRLSCAASGFTFSNYWMNWVRQAPGKGLEWVGEIRLKSNNYATHYAEPVKGRFTISRDDSKSTVYLQMNSLKTEDTAVYYCTRYYGNYGHYFDVWGAGTLVTVSSASTKGPSVFPLAPSSKSTSGGTAALGCLVKDYFPEPVTVSWNSGALTSGVHTFPAVLQSSGLYSLSSVVTVPSSSLGTQTYICNVNHKPSNTKVDKKVEPKSCDKTHTCPPCPAPPVAGPSVFLFPPKPKDTLMISRTPEVTCVVVDVKHEDPEVKFNWYVDGVEVHNAKTKPREEQYNSTYRVVSVLTVLHQDWLNGKEYKCKVSNKALPAPIEKTISKAKGQPREPQVYTLPPSREEMTKNQVSLTCLVKGFYPSDIAVEWESNGQPENNYKTTPPVLDSDGSFFLYSKLTVDKSRWQQGNVFSCSVMHEALHNHYTQKSLSLSPGK

SEQ ID NO: 18622 - protein, 122 aa, Artificial Sequence; identical to SEQ ID NO: 13034
  Description of Artificial Sequence: Synthetic polypeptide
  VH of XENP018328

SEQ ID NO: 18623 - protein, 5 aa, Artificial Sequence
  Description of Artificial Sequence: Synthetic peptide
  XENP018328 vhCDR1
NYWMN

SEQ ID NO: 18624 - protein, 19 aa, Artificial Sequence
  Description of Artificial Sequence: Synthetic peptide
  XENP018328 vhCDR2
EIRLKSNNYATHYAEPVKG

SEQ ID NO: 18625 - protein, 11 aa, Artificial Sequence
  Description of Artificial Sequence: Synthetic peptide
  XENP018328 vhCDR3
YYGNYGHYFDV

SEQ ID NO: 18626 - protein, 214 aa, Artificial Sequence; identical to SEQ ID NO: 16226
  Description of Artificial Sequence: Synthetic polypeptide
  XENP018328 1G6_H1.223_L1_IgG1_PVA_/S267K Light Chain

SEQ ID NO: 18627 - protein, 107 aa, Artificial Sequence; identical to SEQ ID NO: 10923
  Description of Artificial Sequence: Synthetic polypeptide
  VL of XENP018328

SEQ ID NO: 18628 - protein, 11 aa, Artificial Sequence
  Description of Artificial Sequence: Synthetic peptide
  XENP018328 vlCDR1
RASQSVSNDVA

SEQ ID NO: 18629 - protein, 7 aa, Artificial Sequence
  Description of Artificial Sequence: Synthetic peptide
  XENP018328 vlCDR2
YASHRYT

SEQ ID NO: 18630 - protein, 9 aa, Artificial Sequence
  Description of Artificial Sequence: Synthetic peptide
  XENP018328 vlCDR3
QQDYSSPRT

SEQ ID NO: 18631 - protein, 451 aa, Artificial Sequence
  Description of Artificial Sequence: Synthetic polypeptide
  XENP018329 1G6_H1.224_L1_IgG1_PVA_/S267K Heavy Chain
EVQLVESGGGLVKPGGSLRLSCAASGFTFSNYWMNWVRQAPGKGLEWVGEIRLKSNNYATHYAEPVKGRFTISRDDSKSTVYLQMNSLKTEDTAVYYCTRYYGNYGDYFDVWGAGTLVTVSSASTKGPSVFPLAPSSKSTSGGTAALGCLVKDYFPEPVTVSWNSGALTSGVHTFPAVLQSSGLYSLSSVVTVPSSSLGTQTYICNVNHKPSNTKVDKKVEPKSCDKTHTCPPCPAPPVAGPSVFLFPPKPKDTLMISRTPEVTCVVVDVKHEDPEVKFNWYVDGVEVHNAKTKPREEQYNSTYRVVSVLTVLHQDWLNGKEYKCKVSNKALPAPIEKTISKAKGQPREPQVYTLPPSREEMTKNQVSLTCLVKGFYPSDIAVEWESNGQPENNYKTTPPVLDSDGSFFLYSKLTVDKSRWQQGNVFSCSVMHEALHNHYTQKSLSLSPGK

SEQ ID NO: 18632 - protein, 122 aa, Artificial Sequence; identical to SEQ ID NO: 13043
  Description of Artificial Sequence: Synthetic polypeptide
  VH of XENP018329

SEQ ID NO: 18633 - protein, 5 aa, Artificial Sequence
  Description of Artificial Sequence: Synthetic peptide
  XENP018329 vhCDR1
NYWMN

SEQ ID NO: 18634 - protein, 19 aa, Artificial Sequence
  Description of Artificial Sequence: Synthetic peptide
  XENP018329 vhCDR2
EIRLKSNNYATHYAEPVKG

SEQ ID NO: 18635 - protein, 11 aa, Artificial Sequence
  Description of Artificial Sequence: Synthetic peptide
  XENP018329 vhCDR3
YYGNYGDYFDV

SEQ ID NO: 18636 - protein, 214 aa, Artificial Sequence; identical to SEQ ID NO: 16226
  Description of Artificial Sequence: Synthetic polypeptide
  XENP018329 1G6_H1.224_L1_IgG1_PVA_/S267K Light Chain

SEQ ID NO: 18637 - protein, 107 aa, Artificial Sequence; identical to SEQ ID NO: 10923
  Description of Artificial Sequence: Synthetic polypeptide
  VL of XENP018329

SEQ ID NO: 18638 - protein, 11 aa, Artificial Sequence
  Description of Artificial Sequence: Synthetic peptide
  XENP018329 vlCDR1
RASQSVSNDVA

SEQ ID NO: 18639 - protein, 7 aa, Artificial Sequence
  Description of Artificial Sequence: Synthetic peptide
  XENP018329 vlCDR2
YASHRYT

SEQ ID NO: 18640 - protein, 9 aa, Artificial Sequence
  Description of Artificial Sequence: Synthetic peptide
  XENP018329 vlCDR3
QQDYSSPRT

SEQ ID NO: 18641 - protein, 451 aa, Artificial Sequence
  Description of Artificial Sequence: Synthetic polypeptide
  XENP018330 1G6_H1.225_L1_IgG1_PVA_/S267K Heavy Chain
EVQLVESGGGLVKPGGSLRLSCAASGFTFSNYWMNWVRQAPGKGLEWVGEIRLKSNNYATHYAEPVKGRFTISRDDSKSTVYLQMNSLKTEDTAVYYCTRYYGNYGKYFDVWGAGTLVTVSSASTKGPSVFPLAPSSKSTSGGTAALGCLVKDYFPEPVTVSWNSGALTSGVHTFPAVLQSSGLYSLSSVVTVPSSSLGTQTYICNVNHKPSNTKVDKKVEPKSCDKTHTCPPCPAPPVAGPSVFLFPPKPKDTLMISRTPEVTCVVVDVKHEDPEVKFNWYVDGVEVHNAKTKPREEQYNSTYRVVSVLTVLHQDWLNGKEYKCKVSNKALPAPIEKTISKAKGQPREPQVYTLPPSREEMTKNQVSLTCLVKGFYPSDIAVEWESNGQPENNYKTTPPVLDSDGSFFLYSKLTVDKSRWQQGNVFSCSVMHEALHNHYTQKSLSLSPGK

SEQ ID NO: 18642 - protein, 122 aa, Artificial Sequence; identical to SEQ ID NO: 13052
  Description of Artificial Sequence: Synthetic polypeptide
  VH of XENP018330

SEQ ID NO: 18643 - protein, 5 aa, Artificial Sequence
  Description of Artificial Sequence: Synthetic peptide
  XENP018330 vhCDR1
NYWMN

SEQ ID NO: 18644 - protein, 19 aa, Artificial Sequence
  Description of Artificial Sequence: Synthetic peptide
  XENP018330 vhCDR2
EIRLKSNNYATHYAEPVKG

SEQ ID NO: 18645 - protein, 11 aa, Artificial Sequence
  Description of Artificial Sequence: Synthetic peptide
  XENP018330 vhCDR3
YYGNYGKYFDV

SEQ ID NO: 18646 - protein, 214 aa, Artificial Sequence; identical to SEQ ID NO: 16226
  Description of Artificial Sequence: Synthetic polypeptide
  XENP018330 1G6_H1.225_L1_IgG1_PVA_/S267K Light Chain

SEQ ID NO: 18647 - protein, 107 aa, Artificial Sequence; identical to SEQ ID NO: 10923
  Description of Artificial Sequence: Synthetic polypeptide
  VL of XENP018330

SEQ ID NO: 18648 - protein, 11 aa, Artificial Sequence
  Description of Artificial Sequence: Synthetic peptide
  XENP018330 vlCDR1
RASQSVSNDVA

SEQ ID NO: 18649 - protein, 7 aa, Artificial Sequence
  Description of Artificial Sequence: Synthetic peptide
  XENP018330 vlCDR2
YASHRYT

SEQ ID NO: 18650 - protein, 9 aa, Artificial Sequence
  Description of Artificial Sequence: Synthetic peptide
  XENP018330 vlCDR3
QQDYSSPRT

SEQ ID NO: 18651 - protein, 451 aa, Artificial Sequence
  Description of Artificial Sequence: Synthetic polypeptide
  XENP018331 1G6_H1.226_L1_IgG1_PVA_/S267K Heavy Chain
EVQLVESGGGLVKPGGSLRLSCAASGFTFSNYWMNWVRQAPGKGLEWVGEIRLKSNNYATHYAEPVKGRFTISRDDSKSTVYLQMNSLKTEDTAVYYCTRYYGNYGLYFDVWGAGTLVTVSSASTKGPSVFPLAPSSKSTSGGTAALGCLVKDYFPEPVTVSWNSGALTSGVHTFPAVLQSSGLYSLSSVVTVPSSSLGTQTYICNVNHKPSNTKVDKKVEPKSCDKTHTCPPCPAPPVAGPSVFLFPPKPKDTLMISRTPEVTCVVVDVKHEDPEVKFNWYVDGVEVHNAKTKPREEQYNSTYRVVSVLTVLHQDWLNGKEYKCKVSNKALPAPIEKTISKAKGQPREPQVYTLPPSREEMTKNQVSLTCLVKGFYPSDIAVEWESNGQPENNYKTTPPVLDSDGSFFLYSKLTVDKSRWQQGNVFSCSVMHEALHNHYTQKSLSLSPGK

SEQ ID NO: 18652 - protein, 122 aa, Artificial Sequence; identical to SEQ ID NO: 13061
  Description of Artificial Sequence: Synthetic polypeptide
  VH of XENP018331

SEQ ID NO: 18653 - protein, 5 aa, Artificial Sequence
  Description of Artificial Sequence: Synthetic peptide
  XENP018331 vhCDR1
NYWMN

SEQ ID NO: 18654 - protein, 19 aa, Artificial Sequence
  Description of Artificial Sequence: Synthetic peptide
  XENP018331 vhCDR2
EIRLKSNNYATHYAEPVKG

SEQ ID NO: 18655 - protein, 11 aa, Artificial Sequence
  Description of Artificial Sequence: Synthetic peptide
  XENP018331 vhCDR3
YYGNYGLYFDV

SEQ ID NO: 18656 - protein, 214 aa, Artificial Sequence; identical to SEQ ID NO: 16226
  Description of Artificial Sequence: Synthetic polypeptide
  XENP018331 1G6_H1.226_L1_IgG1_PVA_/S267K Light Chain

SEQ ID NO: 18657 - protein, 107 aa, Artificial Sequence; identical to SEQ ID NO: 10923
  Description of Artificial Sequence: Synthetic polypeptide
  VL of XENP018331

SEQ ID NO: 18658 - protein, 11 aa, Artificial Sequence
  Description of Artificial Sequence: Synthetic peptide
  XENP018331 vlCDR1
RASQSVSNDVA

SEQ ID NO: 18659 - protein, 7 aa, Artificial Sequence
  Description of Artificial Sequence: Synthetic peptide
  XENP018331 vlCDR2
YASHRYT

SEQ ID NO: 18660 - protein, 9 aa, Artificial Sequence
  Description of Artificial Sequence: Synthetic peptide
  XENP018331 vlCDR3
QQDYSSPRT

SEQ ID NO: 18661 - protein, 451 aa, Artificial Sequence
  Description of Artificial Sequence: Synthetic polypeptide
  XENP018332 1G6_H1.227_L1_IgG1_PVA_/S267K Heavy Chain
EVQLVESGGGLVKPGGSLRLSCAASGFTFSNYWMNWVRQAPGKGLEWVGEIRLKSNNYATHYAEPVKGRFTISRDDSKSTVYLQMNSLKTEDTAVYYCTRYYGNYGFYFDVWGAGTLVTVSSASTKGPSVFPLAPSSKSTSGGTAALGCLVKDYFPEPVTVSWNSGALTSGVHTFPAVLQSSGLYSLSSVVTVPSSSLGTQTYICNVNHKPSNTKVDKKVEPKSCDKTHTCPPCPAPPVAGPSVFLFPPKPKDTLMISRTPEVTCVVVDVKHEDPEVKFNWYVDGVEVHNAKTKPREEQYNSTYRVVSVLTVLHQDWLNGKEYKCKVSNKALPAPIEKTISKAKGQPREPQVYTLPPSREEMTKNQVSLTCLVKGFYPSDIAVEWESNGQPENNYKTTPPVLDSDGSFFLYSKLTVDKSRWQQGNVFSCSVMHEALHNHYTQKSLSLSPGK

SEQ ID NO: 18662 - protein, 122 aa, Artificial Sequence; identical to SEQ ID NO: 13070
  Description of Artificial Sequence: Synthetic polypeptide
  VH of XENP018332

SEQ ID NO: 18663 - protein, 5 aa, Artificial Sequence
  Description of Artificial Sequence: Synthetic peptide
  XENP018332 vhCDR1
NYWMN

SEQ ID NO: 18664 - protein, 19 aa, Artificial Sequence
  Description of Artificial Sequence: Synthetic peptide
  XENP018332 vhCDR2
EIRLKSNNYATHYAEPVKG

SEQ ID NO: 18665 - protein, 11 aa, Artificial Sequence
  Description of Artificial Sequence: Synthetic peptide
  XENP018332 vhCDR3
YYGNYGFYFDV

SEQ ID NO: 18666 - protein, 214 aa, Artificial Sequence; identical to SEQ ID NO: 16226
  Description of Artificial Sequence: Synthetic polypeptide
  XENP018332 1G6_H1.227_L1_IgG1_PVA_/S267K Light Chain

SEQ ID NO: 18667 - protein, 107 aa, Artificial Sequence; identical to SEQ ID NO: 10923
  Description of Artificial Sequence: Synthetic polypeptide
  VL of XENP018332

SEQ ID NO: 18668 - protein, 11 aa, Artificial Sequence
  Description of Artificial Sequence: Synthetic peptide
  XENP018332 vlCDR1
RASQSVSNDVA

SEQ ID NO: 18669 - protein, 7 aa, Artificial Sequence
  Description of Artificial Sequence: Synthetic peptide
  XENP018332 vlCDR2
YASHRYT

SEQ ID NO: 18670 - protein, 9 aa, Artificial Sequence
  Description of Artificial Sequence: Synthetic peptide
  XENP018332 vlCDR3
QQDYSSPRT

SEQ ID NO: 18671 - protein, 451 aa, Artificial Sequence
  Description of Artificial Sequence: Synthetic polypeptide
  XENP018333 1G6_H1.228_L1_IgG1_PVA_/S267K Heavy Chain
EVQLVESGGGLVKPGGSLRLSCAASGFTFSNYWMNWVRQAPGKGLEWVGEIRLKSNNYATHYAEPVKGRFTISRDDSKSTVYLQMNSLKTEDTAVYYCTRYYGNYGGFFDVWGAGTLVTVSSASTKGPSVFPLAPSSKSTSGGTAALGCLVKDYFPEPVTVSWNSGALTSGVHTFPAVLQSSGLYSLSSVVTVPSSSLGTQTYICNVNHKPSNTKVDKKVEPKSCDKTHTCPPCPAPPVAGPSVFLFPPKPKDTLMISRTPEVTCVVVDVKHEDPEVKFNWYVDGVEVHNAKTKPREEQYNSTYRVVSVLTVLHQDWLNGKEYKCKVSNKALPAPIEKTISKAKGQPREPQVYTLPPSREEMTKNQVSLTCLVKGFYPSDIAVEWESNGQPENNYKTTPPVLDSDGSFFLYSKLTVDKSRWQQGNVFSCSVMHEALHNHYTQKSLSLSPGK

SEQ ID NO: 18672 - protein, 122 aa, Artificial Sequence; identical to SEQ ID NO: 13079
  Description of Artificial Sequence: Synthetic polypeptide
  VH of XENP018333

SEQ ID NO: 18673 - protein, 5 aa, Artificial Sequence
  Description of Artificial Sequence: Synthetic peptide
  XENP018333 vhCDR1
NYWMN

SEQ ID NO: 18674 - protein, 19 aa, Artificial Sequence
  Description of Artificial Sequence: Synthetic peptide
  XENP018333 vhCDR2
EIRLKSNNYATHYAEPVKG

SEQ ID NO: 18675 - protein, 11 aa, Artificial Sequence
  Description of Artificial Sequence: Synthetic peptide
  XENP018333 vhCDR3
YYGNYGGFFDV

SEQ ID NO: 18676 - protein, 214 aa, Artificial Sequence; identical to SEQ ID NO: 16226
  Description of Artificial Sequence: Synthetic polypeptide
  XENP018333 1G6_H1.228_L1_IgG1_PVA_/S267K Light Chain

SEQ ID NO: 18677 - protein, 107 aa, Artificial Sequence; identical to SEQ ID NO: 10923
  Description of Artificial Sequence: Synthetic polypeptide
  VL of XENP018333

SEQ ID NO: 18678 - protein, 11 aa, Artificial Sequence
  Description of Artificial Sequence: Synthetic peptide
  XENP018333 vlCDR1
RASQSVSNDVA

SEQ ID NO: 18679 - protein, 7 aa, Artificial Sequence
  Description of Artificial Sequence: Synthetic peptide
  XENP018333 vlCDR2
YASHRYT

SEQ ID NO: 18680 - protein, 9 aa, Artificial Sequence
  Description of Artificial Sequence: Synthetic peptide
  XENP018333 vlCDR3
QQDYSSPRT

SEQ ID NO: 18681 - protein, 451 aa, Artificial Sequence
  Description of Artificial Sequence: Synthetic polypeptide
  XENP018334 1G6_H1.229_L1_IgG1_PVA_/S267K Heavy Chain
EVQLVESGGGLVKPGGSLRLSCAASGFTFSNYWMNWVRQAPGKGLEWVGEIRLKSNNYATHYAEPVKGRFTISRDDSKSTVYLQMNSLKTEDTAVYYCTRYYGNYGGHFDVWGAGTLVTVSSASTKGPSVFPLAPSSKSTSGGTAALGCLVKDYFPEPVTVSWNSGALTSGVHTFPAVLQSSGLYSLSSVVTVPSSSLGTQTYICNVNHKPSNTKVDKKVEPKSCDKTHTCPPCPAPPVAGPSVFLFPPKPKDTLMISRTPEVTCVVVDVKHEDPEVKFNWYVDGVEVHNAKTKPREEQYNSTYRVVSVLTVLHQDWLNGKEYKCKVSNKALPAPIEKTISKAKGQPREPQVYTLPPSREEMTKNQVSLTCLVKGFYPSDIAVEWESNGQPENNYKTTPPVLDSDGSFFLYSKLTVDKSRWQQGNVFSCSVMHEALHNHYTQKSLSLSPGK

SEQ ID NO: 18682 - protein, 122 aa, Artificial Sequence; identical to SEQ ID NO: 13088
  Description of Artificial Sequence: Synthetic polypeptide
  VH of XENP018334

SEQ ID NO: 18683 - protein, 5 aa, Artificial Sequence
  Description of Artificial Sequence: Synthetic peptide
  XENP018334 vhCDR1
NYWMN

SEQ ID NO: 18684 - protein, 19 aa, Artificial Sequence
  Description of Artificial Sequence: Synthetic peptide
  XENP018334 vhCDR2
EIRLKSNNYATHYAEPVKG

SEQ ID NO: 18685 - protein, 11 aa, Artificial Sequence
  Description of Artificial Sequence: Synthetic peptide
  XENP018334 vhCDR3
YYGNYGGHFDV

SEQ ID NO: 18686 - protein, 214 aa, Artificial Sequence; identical to SEQ ID NO: 16226
  Description of Artificial Sequence: Synthetic polypeptide
  XENP018334 1G6_H1.229_L1_IgG1_PVA_/S267K Light Chain

SEQ ID NO: 18687 - protein, 107 aa, Artificial Sequence; identical to SEQ ID NO: 10923
  Description of Artificial Sequence: Synthetic polypeptide
  VL of XENP018334

SEQ ID NO: 18688 - protein, 11 aa, Artificial Sequence
  Description of Artificial Sequence: Synthetic peptide
  XENP018334 vlCDR1
RASQSVSNDVA

SEQ ID NO: 18689 - protein, 7 aa, Artificial Sequence
  Description of Artificial Sequence: Synthetic peptide
  XENP018334 vlCDR2
YASHRYT

SEQ ID NO: 18690 - protein, 9 aa, Artificial Sequence
  Description of Artificial Sequence: Synthetic peptide
  XENP018334 vlCDR3
QQDYSSPRT

SEQ ID NO: 18691 - protein, 451 aa, Artificial Sequence
  Description of Artificial Sequence: Synthetic polypeptide
  XENP018335 1G6_H1.230_L1_IgG1_PVA_/S267K Heavy Chain
EVQLVESGGGLVKPGGSLRLSCAASGFTFSNYWMNWVRQAPGKGLEWVGEIRLKSNNYATHYAEPVKGRFTISRDDSKSTVYLQMNSLKTEDTAVYYCTRYYGNYGGLFDVWGAGTLVTVSSASTKGPSVFPLAPSSKSTSGGTAALGCLVKDYFPEPVTVSWNSGALTSGVHTFPAVLQSSGLYSLSSVVTVPSSSLGTQTYICNVNHKPSNTKVDKKVEPKSCDKTHTCPPCPAPPVAGPSVFLFPPKPKDTLMISRTPEVTCVVVDVKHEDPEVKFNWYVDGVEVHNAKTKPREEQYNSTYRVVSVLTVLHQDWLNGKEYKCKVSNKALPAPIEKTISKAKGQPREPQVYTLPPSREEMTKNQVSLTCLVKGFYPSDIAVEWESNGQPENNYKTTPPVLDSDGSFFLYSKLTVDKSRWQQGNVFSCSVMHEALHNHYTQKSLSLSPGK

SEQ ID NO: 18692 - protein, 122 aa, Artificial Sequence; identical to SEQ ID NO: 13097
  Description of Artificial Sequence: Synthetic polypeptide
  VH of XENP018335

SEQ ID NO: 18693 - protein, 5 aa, Artificial Sequence
  Description of Artificial Sequence: Synthetic peptide
  XENP018335 vhCDR1
NYWMN

SEQ ID NO: 18694 - protein, 19 aa, Artificial Sequence
  Description of Artificial Sequence: Synthetic peptide
  XENP018335 vhCDR2
EIRLKSNNYATHYAEPVKG

SEQ ID NO: 18695 - protein, 11 aa, Artificial Sequence
  Description of Artificial Sequence: Synthetic peptide
  XENP018335 vhCDR3
YYGNYGGLFDV

SEQ ID NO: 18696 - protein, 214 aa, Artificial Sequence; identical to SEQ ID NO: 16226
  Description of Artificial Sequence: Synthetic polypeptide
  XENP018335 1G6_H1.230_L1_IgG1_PVA_/S267K Light Chain

SEQ ID NO: 18697 - protein, 107 aa, Artificial Sequence; identical to SEQ ID NO: 10923
  Description of Artificial Sequence: Synthetic polypeptide
  VL of XENP018335

SEQ ID NO: 18698 - protein, 11 aa, Artificial Sequence
  Description of Artificial Sequence: Synthetic peptide
  XENP018335 vlCDR1
RASQSVSNDVA

SEQ ID NO: 18699 - protein, 7 aa, Artificial Sequence
  Description of Artificial Sequence: Synthetic peptide
  XENP018335 vlCDR2
YASHRYT

SEQ ID NO: 18700 - protein, 9 aa, Artificial Sequence
  Description of Artificial Sequence: Synthetic peptide
  XENP018335 vlCDR3
QQDYSSPRT

SEQ ID NO: 18701 - protein, 451 aa, Artificial Sequence
  Description of Artificial Sequence: Synthetic polypeptide
  XENP018336 1G6_H1.231_L1_IgG1_PVA_/S267K Heavy Chain
EVQLVESGGGLVKPGGSLRLSCAASGFTFSNYWMNWVRQAPGKGLEWVGEIRLKSNNYATHYAEPVKGRFTISRDDSKSTVYLQMNSLKTEDTAVYYCTRYYGNYGGWFDVWGAGTLVTVSSASTKGPSVFPLAPSSKSTSGGTAALGCLVKDYFPEPVTVSWNSGALTSGVHTFPAVLQSSGLYSLSSVVTVPSSSLGTQTYICNVNHKPSNTKVDKKVEPKSCDKTHTCPPCPAPPVAGPSVFLFPPKPKDTLMISRTPEVTCVVVDVKHEDPEVKFNWYVDGVEVHNAKTKPREEQYNSTYRVVSVLTVLHQDWLNGKEYKCKVSNKALPAPIEKTISKAKGQPREPQVYTLPPSREEMTKNQVSLTCLVKGFYPSDIAVEWESNGQPENNYKTTPPVLDSDGSFFLYSKLTVDKSRWQQGNVFSCSVMHEALHNHYTQKSLSLSPGK

SEQ ID NO: 18702 - protein, 122 aa, Artificial Sequence; identical to SEQ ID NO: 13106
  Description of Artificial Sequence: Synthetic polypeptide
  VH of XENP018336

SEQ ID NO: 18703 - protein, 5 aa, Artificial Sequence
  Description of Artificial Sequence: Synthetic peptide
  XENP018336 vhCDR1
NYWMN

SEQ ID NO: 18704 - protein, 19 aa, Artificial Sequence
  Description of Artificial Sequence: Synthetic peptide
  XENP018336 vhCDR2
EIRLKSNNYATHYAEPVKG

SEQ ID NO: 18705 - protein, 11 aa, Artificial Sequence
  Description of Artificial Sequence: Synthetic peptide
  XENP018336 vhCDR3
YYGNYGGWFDV

SEQ ID NO: 18706 - protein, 214 aa, Artificial Sequence; identical to SEQ ID NO: 16226
  Description of Artificial Sequence: Synthetic polypeptide
  XENP018336 1G6_H1.231_L1_IgG1_PVA_/S267K Light Chain

SEQ ID NO: 18707 - protein, 107 aa, Artificial Sequence; identical to SEQ ID NO: 10923
  Description of Artificial Sequence: Synthetic polypeptide
  VL of XENP018336

SEQ ID NO: 18708 - protein, 11 aa, Artificial Sequence
  Description of Artificial Sequence: Synthetic peptide
  XENP018336 vlCDR1
RASQSVSNDVA

SEQ ID NO: 18709 - protein, 7 aa, Artificial Sequence
  Description of Artificial Sequence: Synthetic peptide
  XENP018336 vlCDR2
YASHRYT

SEQ ID NO: 18710 - protein, 9 aa, Artificial Sequence
  Description of Artificial Sequence: Synthetic peptide
  XENP018336 vlCDR3
QQDYSSPRT

SEQ ID NO: 18711 - protein, 451 aa, Artificial Sequence
  Description of Artificial Sequence: Synthetic polypeptide
  XENP018337 1G6_H1.232_L1_IgG1_PVA_/S267K Heavy Chain
EVQLVESGGGLVKPGGSLRLSCAASGFTFSNYWMNWVRQAPGKGLEWVGEIRLKSNNYATHYAEPVKGRFTISRDDSKSTVYLQMNSLKTEDTAVYYCTRYYGNYGGVFDVWGAGTLVTVSSASTKGPSVFPLAPSSKSTSGGTAALGCLVKDYFPEPVTVSWNSGALTSGVHTFPAVLQSSGLYSLSSVVTVPSSSLGTQTYICNVNHKPSNTKVDKKVEPKSCDKTHTCPPCPAPPVAGPSVFLFPPKPKDTLMISRTPEVTCVVVDVKHEDPEVKFNWYVDGVEVHNAKTKPREEQYNSTYRVVSVLTVLHQDWLNGKEYKCKVSNKALPAPIEKTISKAKGQPREPQVYTLPPSREEMTKNQVSLTCLVKGFYPSDIAVEWESNGQPENNYKTTPPVLDSDGSFFLYSKLTVDKSRWQQGNVFSCSVMHEALHNHYTQKSLSLSPGK

SEQ ID NO: 18712 - protein, 122 aa, Artificial Sequence; identical to SEQ ID NO: 13115
  Description of Artificial Sequence: Synthetic polypeptide
  VH of XENP018337

SEQ ID NO: 18713 - protein, 5 aa, Artificial Sequence
  Description of Artificial Sequence: Synthetic peptide
  XENP018337 vhCDR1
NYWMN

SEQ ID NO: 18714 - protein, 19 aa, Artificial Sequence
  Description of Artificial Sequence: Synthetic peptide
  XENP018337 vhCDR2
EIRLKSNNYATHYAEPVKG

SEQ ID NO: 18715 - protein, 11 aa, Artificial Sequence
  Description of Artificial Sequence: Synthetic peptide
  XENP018337 vhCDR3
YYGNYGGVFDV

SEQ ID NO: 18716 - protein, 214 aa, Artificial Sequence; identical to SEQ ID NO: 16226
  Description of Artificial Sequence: Synthetic polypeptide
  XENP018337 1G6_H1.232_L1_IgG1_PVA_/S267K Light Chain

SEQ ID NO: 18717 - protein, 107 aa, Artificial Sequence; identical to SEQ ID NO: 10923
  Description of Artificial Sequence: Synthetic polypeptide
  VL of XENP018337

SEQ ID NO: 18718 - protein, 11 aa, Artificial Sequence
  Description of Artificial Sequence: Synthetic peptide
  XENP018337 vlCDR1
RASQSVSNDVA

SEQ ID NO: 18719 - protein, 7 aa, Artificial Sequence
  Description of Artificial Sequence: Synthetic peptide
  XENP018337 vlCDR2
YASHRYT

SEQ ID NO: 18720 - protein, 9 aa, Artificial Sequence
  Description of Artificial Sequence: Synthetic peptide
  XENP018337 vlCDR3
QQDYSSPRT

SEQ ID NO: 18721 - protein, 451 aa, Artificial Sequence
  Description of Artificial Sequence: Synthetic polypeptide
  XENP018338 1G6_H1.233_L1_IgG1_PVA_/S267K Heavy Chain
EVQLVESGGGLVKPGGSLRLSCAASGFTFSNYWMNWVRQAPGKGLEWVGEIRLKSNNYATHYAEPVKGRFTISRDDSKSTVYLQMNSLKTEDTAVYYCTRYYGNYGGAFDVWGAGTLVTVSSASTKGPSVFPLAPSSKSTSGGTAALGCLVKDYFPEPVTVSWNSGALTSGVHTFPAVLQSSGLYSLSSVVTVPSSSLGTQTYICNVNHKPSNTKVDKKVEPKSCDKTHTCPPCPAPPVAGPSVFLFPPKPKDTLMISRTPEVTCVVVDVKHEDPEVKFNWYVDGVEVHNAKTKPREEQYNSTYRVVSVLTVLHQDWLNGKEYKCKVSNKALPAPIEKTISKAKGQPREPQVYTLPPSREEMTKNQVSLTCLVKGFYPSDIAVEWESNGQPENNYKTTPPVLDSDGSFFLYSKLTVDKSRWQQGNVFSCSVMHEALHNHYTQKSLSLSPGK

SEQ ID NO: 18722 - protein, 122 aa, Artificial Sequence; identical to SEQ ID NO: 13124
  Description of Artificial Sequence: Synthetic polypeptide
  VH of XENP018338

SEQ ID NO: 18723 - protein, 5 aa, Artificial Sequence
  Description of Artificial Sequence: Synthetic peptide
  XENP018338 vhCDR1
NYWMN

SEQ ID NO: 18724 - protein, 19 aa, Artificial Sequence
  Description of Artificial Sequence: Synthetic peptide
  XENP018338 vhCDR2
EIRLKSNNYATHYAEPVKG

SEQ ID NO: 18725 - protein, 11 aa, Artificial Sequence
  Description of Artificial Sequence: Synthetic peptide
  XENP018338 vhCDR3
YYGNYGGAFDV

SEQ ID NO: 18726 - protein, 214 aa, Artificial Sequence; identical to SEQ ID NO: 16226
  Description of Artificial Sequence: Synthetic polypeptide
  XENP018338 1G6_H1.233_L1_IgG1_PVA_/S267K Light Chain

SEQ ID NO: 18727 - protein, 107 aa, Artificial Sequence; identical to SEQ ID NO: 10923
  Description of Artificial Sequence: Synthetic polypeptide
  VL of XENP018338

SEQ ID NO: 18728 - protein, 11 aa, Artificial Sequence
  Description of Artificial Sequence: Synthetic peptide
  XENP018338 vlCDR1
RASQSVSNDVA

SEQ ID NO: 18729 - protein, 7 aa, Artificial Sequence
  Description of Artificial Sequence: Synthetic peptide
  XENP018338 vlCDR2
YASHRYT

SEQ ID NO: 18730 - protein, 9 aa, Artificial Sequence
  Description of Artificial Sequence: Synthetic peptide
  XENP018338 vlCDR3
QQDYSSPRT

SEQ ID NO: 18731 - protein, 451 aa, Artificial Sequence
  Description of Artificial Sequence: Synthetic polypeptide
  XENP018339 1G6_H1.234_L1_IgG1_PVA_/S267K Heavy Chain
EVQLVESGGGLVKPGGSLRLSCAASGFTFSNYWMNWVRQAPGKGLEWVGEIRLKSNNYATHYAEPVKGRFTISRDDSKSTVYLQMNSLKTEDTAVYYCTRYYGNYGGQFDVWGAGTLVTVSSASTKGPSVFPLAPSSKSTSGGTAALGCLVKDYFPEPVTVSWNSGALTSGVHTFPAVLQSSGLYSLSSVVTVPSSSLGTQTYICNVNHKPSNTKVDKKVEPKSCDKTHTCPPCPAPPVAGPSVFLFPPKPKDTLMISRTPEVTCVVVDVKHEDPEVKFNWYVDGVEVHNAKTKPREEQYNSTYRVVSVLTVLHQDWLNGKEYKCKVSNKALPAPIEKTISKAKGQPREPQVYTLPPSREEMTKNQVSLTCLVKGFYPSDIAVEWESNGQPENNYKTTPPVLDSDGSFFLYSKLTVDKSRWQQGNVFSCSVMHEALHNHYTQKSLSLSPGK

SEQ ID NO: 18732 - protein, 122 aa, Artificial Sequence; identical to SEQ ID NO: 13133
  Description of Artificial Sequence: Synthetic polypeptide
  VH of XENP018339

SEQ ID NO: 18733 - protein, 5 aa, Artificial Sequence
  Description of Artificial Sequence: Synthetic peptide
  XENP018339 vhCDR1
NYWMN

SEQ ID NO: 18734 - protein, 19 aa, Artificial Sequence
  Description of Artificial Sequence: Synthetic peptide
  XENP018339 vhCDR2
EIRLKSNNYATHYAEPVKG

SEQ ID NO: 18735 - protein, 11 aa, Artificial Sequence
  Description of Artificial Sequence: Synthetic peptide
  XENP018339 vhCDR3
YYGNYGGQFDV

SEQ ID NO: 18736 - protein, 214 aa, Artificial Sequence; identical to SEQ ID NO: 16226
  Description of Artificial Sequence: Synthetic polypeptide
  XENP018339 1G6_H1.234_L1_IgG1_PVA_/S267K Light Chain

SEQ ID NO: 18737 - protein, 107 aa, Artificial Sequence; identical to SEQ ID NO: 10923
  Description of Artificial Sequence: Synthetic polypeptide
  VL of XENP018339

SEQ ID NO: 18738 - protein, 11 aa, Artificial Sequence
  Description of Artificial Sequence: Synthetic peptide
  XENP018339 vlCDR1
RASQSVSNDVA

SEQ ID NO: 18739 - protein, 7 aa, Artificial Sequence
  Description of Artificial Sequence: Synthetic peptide
  XENP018339 vlCDR2
YASHRYT

SEQ ID NO: 18740 - protein, 9 aa, Artificial Sequence
  Description of Artificial Sequence: Synthetic peptide
  XENP018339 vlCDR3
QQDYSSPRT

SEQ ID NO: 18741 - protein, 451 aa, Artificial Sequence
  Description of Artificial Sequence: Synthetic polypeptide
  XENP018340 1G6_H1.235_L1_IgG1_PVA_/S267K Heavy Chain
EVQLVESGGGLVKPGGSLRLSCAASGFTFSNYWMNWVRQAPGKGLEWVGEIRLKSNNYATHYAEPVKGRFTISRDDSKSTVYLQMNSLKTEDTAVYYCTRYYGNYGGDFDVWGAGTLVTVSSASTKGPSVFPLAPSSKSTSGGTAALGCLVKDYFPEPVTVSWNSGALTSGVHTFPAVLQSSGLYSLSSVVTVPSSSLGTQTYICNVNHKPSNTKVDKKVEPKSCDKTHTCPPCPAPPVAGPSVFLFPPKPKDTLMISRTPEVTCVVVDVKHEDPEVKFNWYVDGVEVHNAKTKPREEQYNSTYRVVSVLTVLHQDWLNGKEYKCKVSNKALPAPIEKTISKAKGQPREPQVYTLPPSREEMTKNQVSLTCLVKGFYPSDIAVEWESNGQPENNYKTTPPVLDSDGSFFLYSKLTVDKSRWQQGNVFSCSVMHEALHNHYTQKSLSLSPGK

SEQ ID NO: 18742 - protein, 122 aa, Artificial Sequence; identical to SEQ ID NO: 13142
  Description of Artificial Sequence: Synthetic polypeptide
  VH of XENP018340

SEQ ID NO: 18743 - protein, 5 aa, Artificial Sequence
  Description of Artificial Sequence: Synthetic peptide
  XENP018340 vhCDR1
NYWMN

SEQ ID NO: 18744 - protein, 19 aa, Artificial Sequence
  Description of Artificial Sequence: Synthetic peptide
  XENP018340 vhCDR2
EIRLKSNNYATHYAEPVKG

SEQ ID NO: 18745 - protein, 11 aa, Artificial Sequence
  Description of Artificial Sequence: Synthetic peptide
  XENP018340 vhCDR3
YYGNYGGDFDV

SEQ ID NO: 18746 - protein, 214 aa, Artificial Sequence; identical to SEQ ID NO: 16226
  Description of Artificial Sequence: Synthetic polypeptide
  XENP018340 1G6_H1.235_L1_IgG1_PVA_/S267K Light Chain

SEQ ID NO: 18747 - protein, 107 aa, Artificial Sequence; identical to SEQ ID NO: 10923
  Description of Artificial Sequence: Synthetic polypeptide
  VL of XENP018340

SEQ ID NO: 18748 - protein, 11 aa, Artificial Sequence
  Description of Artificial Sequence: Synthetic peptide
  XENP018340 vlCDR1
RASQSVSNDVA

SEQ ID NO: 18749 - protein, 7 aa, Artificial Sequence
  Description of Artificial Sequence: Synthetic peptide
  XENP018340 vlCDR2
YASHRYT

SEQ ID NO: 18750 - protein, 9 aa, Artificial Sequence
  Description of Artificial Sequence: Synthetic peptide
  XENP018340 vlCDR3
QQDYSSPRT

SEQ ID NO: 18751 - protein, 451 aa, Artificial Sequence
  Description of Artificial Sequence: Synthetic polypeptide
  XENP018341 1G6_H1.236_L1_IgG1_PVA_/S267K Heavy Chain
EVQLVESGGGLVKPGGSLRLSCAASGFTFSNYWMNWVRQAPGKGLEWVGEIRLKSNNYATHYAEPVKGRFTISRDDSKSTVYLQMNSLKTEDTAVYYCTRYYGNYGGKFDVWGAGTLVTVSSASTKGPSVFPLAPSSKSTSGGTAALGCLVKDYFPEPVTVSWNSGALTSGVHTFPAVLQSSGLYSLSSVVTVPSSSLGTQTYICNVNHKPSNTKVDKKVEPKSCDKTHTCPPCPAPPVAGPSVFLFPPKPKDTLMISRTPEVTCVVVDVKHEDPEVKFNWYVDGVEVHNAKTKPREEQYNSTYRVVSVLTVLHQDWLNGKEYKCKVSNKALPAPIEKTISKAKGQPREPQVYTLPPSREEMTKNQVSLTCLVKGFYPSDIAVEWESNGQPENNYKTTPPVLDSDGSFFLYSKLTVDKSRWQQGNVFSCSVMHEALHNHYTQKSLSLSPGK

SEQ ID NO: 18752 - protein, 122 aa, Artificial Sequence; identical to SEQ ID NO: 13151
  Description of Artificial Sequence: Synthetic polypeptide
  VH of XENP018341

SEQ ID NO: 18753 - protein, 5 aa, Artificial Sequence
  Description of Artificial Sequence: Synthetic peptide
  XENP018341 vhCDR1
NYWMN

SEQ ID NO: 18754 - protein, 19 aa, Artificial Sequence
  Description of Artificial Sequence: Synthetic peptide
  XENP018341 vhCDR2
EIRLKSNNYATHYAEPVKG

SEQ ID NO: 18755 - protein, 11 aa, Artificial Sequence
  Description of Artificial Sequence: Synthetic peptide
  XENP018341 vhCDR3
YYGNYGGKFDV

SEQ ID NO: 18756 - protein, 214 aa, Artificial Sequence; identical to SEQ ID NO: 16226
  Description of Artificial Sequence: Synthetic polypeptide
  XENP018341 1G6_H1.236_L1_IgG1_PVA_/S267K Light Chain

SEQ ID NO: 18757 - protein, 107 aa, Artificial Sequence; identical to SEQ ID NO: 10923
  Description of Artificial Sequence: Synthetic polypeptide
  VL of XENP018341

SEQ ID NO: 18758 - protein, 11 aa, Artificial Sequence
  Description of Artificial Sequence: Synthetic peptide
  XENP018341 vlCDR1
RASQSVSNDVA

SEQ ID NO: 18759 - protein, 7 aa, Artificial Sequence
  Description of Artificial Sequence: Synthetic peptide
  XENP018341 vlCDR2
YASHRYT

SEQ ID NO: 18760 - protein, 9 aa, Artificial Sequence
  Description of Artificial Sequence: Synthetic peptide
  XENP018341 vlCDR3
QQDYSSPRT

SEQ ID NO: 18761 - protein, 451 aa, Artificial Sequence
  Description of Artificial Sequence: Synthetic polypeptide
  XENP018342 1G6_H1.237_L1_IgG1_PVA_/S267K Heavy Chain
EVQLVESGGGLVKPGGSLRLSCAASGFTFSNYWMNWVRQAPGKGLEWVGEIRLKSNNYATHYAEPVKGRFTISRDDSKSTVYLQMNSLKTEDTAVYYCTRYYGNYGGYFDYWGAGTLVTVSSASTKGPSVFPLAPSSKSTSGGTAALGCLVKDYFPEPVTVSWNSGALTSGVHTFPAVLQSSGLYSLSSVVTVPSSSLGTQTYICNVNHKPSNTKVDKKVEPKSCDKTHTCPPCPAPPVAGPSVFLFPPKPKDTLMISRTPEVTCVVVDVKHEDPEVKFNWYVDGVEVHNAKTKPREEQYNSTYRVVSVLTVLHQDWLNGKEYKCKVSNKALPAPIEKTISKAKGQPREPQVYTLPPSREEMTKNQVSLTCLVKGFYPSDIAVEWESNGQPENNYKTTPPVLDSDGSFFLYSKLTVDKSRWQQGNVFSCSVMHEALHNHYTQKSLSLSPGK

SEQ ID NO: 18762 - protein, 122 aa, Artificial Sequence; identical to SEQ ID NO: 13160
  Description of Artificial Sequence: Synthetic polypeptide
  VH of XENP018342

SEQ ID NO: 18763 - protein, 5 aa, Artificial Sequence
  Description of Artificial Sequence: Synthetic peptide
  XENP018342 vhCDR1
NYWMN

SEQ ID NO: 18764 - protein, 19 aa, Artificial Sequence
  Description of Artificial Sequence: Synthetic peptide
  XENP018342 vhCDR2
EIRLKSNNYATHYAEPVKG

SEQ ID NO: 18765 - protein, 11 aa, Artificial Sequence
  Description of Artificial Sequence: Synthetic peptide
  XENP018342 vhCDR3
YYGNYGGYFDY

SEQ ID NO: 18766 - protein, 214 aa, Artificial Sequence; identical to SEQ ID NO: 16226
  Description of Artificial Sequence: Synthetic polypeptide
  XENP018342 1G6_H1.237_L1_IgG1_PVA_/S267K Light Chain

SEQ ID NO: 18767 - protein, 107 aa, Artificial Sequence; identical to SEQ ID NO: 10923
  Description of Artificial Sequence: Synthetic polypeptide
  VL of XENP018342

SEQ ID NO: 18768 - protein, 11 aa, Artificial Sequence
  Description of Artificial Sequence: Synthetic peptide
  XENP018342 vlCDR1
RASQSVSNDVA

SEQ ID NO: 18769 - protein, 7 aa, Artificial Sequence
  Description of Artificial Sequence: Synthetic peptide
  XENP018342 vlCDR2
YASHRYT

SEQ ID NO: 18770 - protein, 9 aa, Artificial Sequence
  Description of Artificial Sequence: Synthetic peptide
  XENP018342 vlCDR3
QQDYSSPRT

SEQ ID NO: 18771 - protein, 451 aa, Artificial Sequence
  Description of Artificial Sequence: Synthetic polypeptide
  XENP018343 1G6_H1.238_L1_IgG1_PVA_/S267K Heavy Chain
EVQLVESGGGLVKPGGSLRLSCAASGFTFSNYWMNWVRQAPGKGLEWVGEIRLKSNNYATHYAEPVKGRFTISRDDSKSTVYLQMNSLKTEDTAVYYCTRYYGNYGGYFDVWGQGTLVTVSSASTKGPSVFPLAPSSKSTSGGTAALGCLVKDYFPEPVTVSWNSGALTSGVHTFPAVLQSSGLYSLSSVVTVPSSSLGTQTYICNVNHKPSNTKVDKKVEPKSCDKTHTCPPCPAPPVAGPSVFLFPPKPKDTLMISRTPEVTCVVVDVKHEDPEVKFNWYVDGVEVHNAKTKPREEQYNSTYRVVSVLTVLHQDWLNGKEYKCKVSNKALPAPIEKTISKAKGQPREPQVYTLPPSREEMTKNQVSLTCLVKGFYPSDIAVEWESNGQPENNYKTTPPVLDSDGSFFLYSKLTVDKSRWQQGNVFSCSVMHEALHNHYTQKSLSLSPGK

SEQ ID NO: 18772 - protein, 122 aa, Artificial Sequence; identical to SEQ ID NO: 13169
  Description of Artificial Sequence: Synthetic polypeptide
  VH of XENP018343

SEQ ID NO: 18773 - protein, 5 aa, Artificial Sequence
  Description of Artificial Sequence: Synthetic peptide
  XENP018343 vhCDR1
NYWMN

SEQ ID NO: 18774 - protein, 19 aa, Artificial Sequence
  Description of Artificial Sequence: Synthetic peptide
  XENP018343 vhCDR2
EIRLKSNNYATHYAEPVKG

SEQ ID NO: 18775 - protein, 11 aa, Artificial Sequence
  Description of Artificial Sequence: Synthetic peptide
  XENP018343 vhCDR3
YYGNYGGYFDV

SEQ ID NO: 18776 - protein, 214 aa, Artificial Sequence; identical to SEQ ID NO: 16226
  Description of Artificial Sequence: Synthetic polypeptide
  XENP018343 1G6_H1.238_L1_IgG1_PVA_/S267K Light Chain

SEQ ID NO: 18777 - protein, 107 aa, Artificial Sequence; identical to SEQ ID NO: 10923
  Description of Artificial Sequence: Synthetic polypeptide
  VL of XENP018343

SEQ ID NO: 18778 - protein, 11 aa, Artificial Sequence
  Description of Artificial Sequence: Synthetic peptide
  XENP018343 vlCDR1
RASQSVSNDVA

SEQ ID NO: 18779 - protein, 7 aa, Artificial Sequence
  Description of Artificial Sequence: Synthetic peptide
  XENP018343 vlCDR2
YASHRYT

SEQ ID NO: 18780 - protein, 9 aa, Artificial Sequence
  Description of Artificial Sequence: Synthetic peptide
  XENP018343 vlCDR3
QQDYSSPRT

SEQ ID NO: 18781 - protein, 451 aa, Artificial Sequence; identical to SEQ ID NO: 16221
  Description of Artificial Sequence: Synthetic polypeptide
  XENP018344 1G6_H1_L1.1_IgG1_PVA_/S267K Heavy Chain

SEQ ID NO: 18782 - protein, 122 aa, Artificial Sequence; identical to SEQ ID NO: 10922
  Description of Artificial Sequence: Synthetic polypeptide
  VH of XENP018344

SEQ ID NO: 18783 - protein, 5 aa, Artificial Sequence
  Description of Artificial Sequence: Synthetic peptide
  XENP018344 vhCDR1
NYWMN

SEQ ID NO: 18784 - protein, 19 aa, Artificial Sequence
  Description of Artificial Sequence: Synthetic peptide
  XENP018344 vhCDR2
EIRLKSNNYATHYAEPVKG

SEQ ID NO: 18785 - protein, 11 aa, Artificial Sequence
  Description of Artificial Sequence: Synthetic peptide
  XENP018344 vhCDR3
YYGNYGGYFDV

SEQ ID NO: 18786 - protein, 214 aa, Artificial Sequence
  Description of Artificial Sequence: Synthetic polypeptide
  XENP018344 1G6_H1_L1.1_IgG1_PVA_/S267K Light Chain
EIVMTQSPATLSVSPGERATLSCRASQSVSNDVAWYQQKPGQSPRLLINYASHRYTGVPDRFTGSGYGTEFTLTISSLQSEDFAVYFCQQDYSSPRTFGGGTKVEIKRTVAAPSVFIFPPSDEQLKSGTASVVCLLNNFYPREAKVQWKVDNALQSGNSQESVTEQDSKDSTYSLSSTLTLSKADYEKHKVYACEVTHQGLSSPVTKSFNRGEC

SEQ ID NO: 18787 - protein, 107 aa, Artificial Sequence; identical to SEQ ID NO: 13179
  Description of Artificial Sequence: Synthetic polypeptide
  VL of XENP018344

SEQ ID NO: 18788 - protein, 11 aa, Artificial Sequence
  Description of Artificial Sequence: Synthetic peptide
  XENP018344 vlCDR1
RASQSVSNDVA

SEQ ID NO: 18789 - protein, 7 aa, Artificial Sequence
  Description of Artificial Sequence: Synthetic peptide
  XENP018344 vlCDR2
YASHRYT

SEQ ID NO: 18790 - protein, 9 aa, Artificial Sequence
  Description of Artificial Sequence: Synthetic peptide
  XENP018344 vlCDR3
QQDYSSPRT

SEQ ID NO: 18791 - protein, 451 aa, Artificial Sequence; identical to SEQ ID NO: 16221
  Description of Artificial Sequence: Synthetic polypeptide
  XENP018345 1G6_H1_L1.2_IgG1_PVA_/S267K Heavy Chain

SEQ ID NO: 18792 - protein, 122 aa, Artificial Sequence; identical to SEQ ID NO: 10922
  Description of Artificial Sequence: Synthetic polypeptide
  VH of XENP018345

SEQ ID NO: 18793 - protein, 5 aa, Artificial Sequence
  Description of Artificial Sequence: Synthetic peptide
  XENP018345 vhCDR1
NYWMN

SEQ ID NO: 18794 - protein, 19 aa, Artificial Sequence
  Description of Artificial Sequence: Synthetic peptide
  XENP018345 vhCDR2
EIRLKSNNYATHYAEPVKG

SEQ ID NO: 18795 - protein, 11 aa, Artificial Sequence
  Description of Artificial Sequence: Synthetic peptide
  XENP018345 vhCDR3
YYGNYGGYFDV

SEQ ID NO: 18796 - protein, 214 aa, Artificial Sequence
  Description of Artificial Sequence: Synthetic polypeptide
  XENP018345 1G6_H1_L1.2_IgG1_PVA_/S267K Light Chain
DIVMTQSPATLSVSPGERATLSCRASQSVSNDVAWYQQKPGQSPRLLINYASHRYTGVPDRFTGSGYGTEFTLTISSLQSEDFAVYFCQQDYSSPRTFGGGTKVEIKRTVAAPSVFIFPPSDEQLKSGTASVVCLLNNFYPREAKVQWKVDNALQSGNSQESVTEQDSKDSTYSLSSTLTLSKADYEKHKVYACEVTHQGLSSPVTKSFNRGEC

SEQ ID NO: 18797 - protein, 107 aa, Artificial Sequence; identical to SEQ ID NO: 13188
  Description of Artificial Sequence: Synthetic polypeptide
  VL of XENP018345

SEQ ID NO: 18798 - protein, 11 aa, Artificial Sequence
  Description of Artificial Sequence: Synthetic peptide
  XENP018345 vlCDR1
RASQSVSNDVA

SEQ ID NO: 18799 - protein, 7 aa, Artificial Sequence
  Description of Artificial Sequence: Synthetic peptide
  XENP018345 vlCDR2
YASHRYT

SEQ ID NO: 18800 - protein, 9 aa, Artificial Sequence
  Description of Artificial Sequence: Synthetic peptide
  XENP018345 vlCDR3
QQDYSSPRT

SEQ ID NO: 18801 - protein, 451 aa, Artificial Sequence; identical to SEQ ID NO: 16221
  Description of Artificial Sequence: Synthetic polypeptide
  XENP018346 1G6_H1_L1.3_IgG1_PVA_/S267K Heavy Chain

SEQ ID NO: 18802 - protein, 122 aa, Artificial Sequence; identical to SEQ ID NO: 10922
  Description of Artificial Sequence: Synthetic polypeptide
  VH of XENP018346

SEQ ID NO: 18803 - protein, 5 aa, Artificial Sequence
  Description of Artificial Sequence: Synthetic peptide
  XENP018346 vhCDR1
NYWMN

SEQ ID NO: 18804 - protein, 19 aa, Artificial Sequence
  Description of Artificial Sequence: Synthetic peptide
  XENP018346 vhCDR2
EIRLKSNNYATHYAEPVKG

SEQ ID NO: 18805 - protein, 11 aa, Artificial Sequence
  Description of Artificial Sequence: Synthetic peptide
  XENP018346 vhCDR3
YYGNYGGYFDV

SEQ ID NO: 18806 - protein, 214 aa, Artificial Sequence
  Description of Artificial Sequence: Synthetic polypeptide
  XENP018346 1G6_H1_L1.3_IgG1_PVA_/S267K Light Chain
SVVMTQSPATLSVSPGERATLSCRASQSVSNDVAWYQQKPGQSPRLLINYASHRYTGVPDRFTGSGYGTEFTLTISSLQSEDFAVYFCQQDYSSPRTFGGGTKVEIKRTVAAPSVFIFPPSDEQLKSGTASVVCLLNNFYPREAKVQWKVDNALQSGNSQESVTEQDSKDSTYSLSSTLTLSKADYEKHKVYACEVTHQGLSSPVTKSFNRGEC

SEQ ID NO: 18807 - protein, 107 aa, Artificial Sequence; identical to SEQ ID NO: 13197
  Description of Artificial Sequence: Synthetic polypeptide
  VL of XENP018346

SEQ ID NO: 18808 - protein, 11 aa, Artificial Sequence
  Description of Artificial Sequence: Synthetic peptide
  XENP018346 vlCDR1
RASQSVSNDVA

SEQ ID NO: 18809 - protein, 7 aa, Artificial Sequence
  Description of Artificial Sequence: Synthetic peptide
  XENP018346 vlCDR2
YASHRYT

SEQ ID NO: 18810 - protein, 9 aa, Artificial Sequence
  Description of Artificial Sequence: Synthetic peptide
  XENP018346 vlCDR3
QQDYSSPRT

SEQ ID NO: 18811 - protein, 451 aa, Artificial Sequence; identical to SEQ ID NO: 16221
  Description of Artificial Sequence: Synthetic polypeptide
  XENP018347 1G6_H1_L1.4_IgG1_PVA_/S267K Heavy Chain

SEQ ID NO: 18812 - protein, 122 aa, Artificial Sequence; identical to SEQ ID NO: 10922
  Description of Artificial Sequence: Synthetic polypeptide
  VH of XENP018347

SEQ ID NO: 18813 - protein, 5 aa, Artificial Sequence
  Description of Artificial Sequence: Synthetic peptide
  XENP018347 vhCDR1
NYWMN

SEQ ID NO: 18814 - protein, 19 aa, Artificial Sequence
  Description of Artificial Sequence: Synthetic peptide
  XENP018347 vhCDR2
EIRLKSNNYATHYAEPVKG

SEQ ID NO: 18815 - protein, 11 aa, Artificial Sequence
  Description of Artificial Sequence: Synthetic peptide
  XENP018347 vhCDR3
YYGNYGGYFDV

SEQ ID NO: 18816 - protein, 214 aa, Artificial Sequence
  Description of Artificial Sequence: Synthetic polypeptide
  XENP018347 1G6_H1_L1.4_IgG1_PVA_/S267K Light Chain
SIVLTQSPATLSVSPGERATLSCRASQSVSNDVAWYQQKPGQSPRLLINYASHRYTGVPDRFTGSGYGTEFTLTISSLQSEDFAVYFCQQDYSSPRTFGGGTKVEIKRTVAAPSVFIFPPSDEQLKSGTASVVCLLNNFYPREAKVQWKVDNALQSGNSQESVTEQDSKDSTYSLSSTLTLSKADYEKHKVYACEVTHQGLSSPVTKSFNRGEC

SEQ ID NO: 18817 - protein, 107 aa, Artificial Sequence; identical to SEQ ID NO: 13206
  Description of Artificial Sequence: Synthetic polypeptide
  VL of XENP018347

SEQ ID NO: 18818 - protein, 11 aa, Artificial Sequence
  Description of Artificial Sequence: Synthetic peptide
  XENP018347 vlCDR1
RASQSVSNDVA

SEQ ID NO: 18819 - protein, 7 aa, Artificial Sequence
  Description of Artificial Sequence: Synthetic peptide
  XENP018347 vlCDR2
YASHRYT

SEQ ID NO: 18820 - protein, 9 aa, Artificial Sequence
  Description of Artificial Sequence: Synthetic peptide
  XENP018347 vlCDR3
QQDYSSPRT

SEQ ID NO: 18821 - protein, 451 aa, Artificial Sequence; identical to SEQ ID NO: 16221
  Description of Artificial Sequence: Synthetic polypeptide
  XENP018348 1G6_H1_L1.5_IgG1_PVA_/S267K Heavy Chain

SEQ ID NO: 18822 - protein, 122 aa, Artificial Sequence; identical to SEQ ID NO: 10922
  Description of Artificial Sequence: Synthetic polypeptide
  VH of XENP018348

SEQ ID NO: 18823 - protein, 5 aa, Artificial Sequence
  Description of Artificial Sequence: Synthetic peptide
  XENP018348 vhCDR1
NYWMN

SEQ ID NO: 18824 - protein, 19 aa, Artificial Sequence
  Description of Artificial Sequence: Synthetic peptide
  XENP018348 vhCDR2
EIRLKSNNYATHYAEPVKG

SEQ ID NO: 18825 - protein, 11 aa, Artificial Sequence
  Description of Artificial Sequence: Synthetic peptide
  XENP018348 vhCDR3
YYGNYGGYFDV

SEQ ID NO: 18826 - protein, 214 aa, Artificial Sequence
  Description of Artificial Sequence: Synthetic polypeptide
  XENP018348 1G6_H1_L1.5_IgG1_PVA_/S267K Light Chain
SIVMTQTPATLSVSPGERATLSCRASQSVSNDVAWYQQKPGQSPRLLINYASHRYTGVPDRFTGSGYGTEFTLTISSLQSEDFAVYFCQQDYSSPRTFGGGTKVEIKRTVAAPSVFIFPPSDEQLKSGTASVVCLLNNFYPREAKVQWKVDNALQSGNSQESVTEQDSKDSTYSLSSTLTLSKADYEKHKVYACEVTHQGLSSPVTKSFNRGEC

SEQ ID NO: 18827 - protein, 107 aa, Artificial Sequence; identical to SEQ ID NO: 13215
  Description of Artificial Sequence: Synthetic polypeptide
  VL of XENP018348

SEQ ID NO: 18828 - protein, 11 aa, Artificial Sequence
  Description of Artificial Sequence: Synthetic peptide
  XENP018348 vlCDR1
RASQSVSNDVA

SEQ ID NO: 18829 - protein, 7 aa, Artificial Sequence
  Description of Artificial Sequence: Synthetic peptide
  XENP018348 vlCDR2
YASHRYT

SEQ ID NO: 18830 - protein, 9 aa, Artificial Sequence
  Description of Artificial Sequence: Synthetic peptide
  XENP018348 vlCDR3
QQDYSSPRT

SEQ ID NO: 18831 - protein, 451 aa, Artificial Sequence; identical to SEQ ID NO: 16221
  Description of Artificial Sequence: Synthetic polypeptide
  XENP018349 1G6_H1_L1.6_IgG1_PVA_/S267K Heavy Chain

SEQ ID NO: 18832 - protein, 122 aa, Artificial Sequence; identical to SEQ ID NO: 10922
  Description of Artificial Sequence: Synthetic polypeptide
  VH of XENP018349

SEQ ID NO: 18833 - protein, 5 aa, Artificial Sequence
  Description of Artificial Sequence: Synthetic peptide
  XENP018349 vhCDR1
NYWMN

SEQ ID NO: 18834 - protein, 19 aa, Artificial Sequence
  Description of Artificial Sequence: Synthetic peptide
  XENP018349 vhCDR2
EIRLKSNNYATHYAEPVKG

SEQ ID NO: 18835 - protein, 11 aa, Artificial Sequence
  Description of Artificial Sequence: Synthetic peptide
  XENP018349 vhCDR3
YYGNYGGYFDV

SEQ ID NO: 18836 - protein, 214 aa, Artificial Sequence
  Description of Artificial Sequence: Synthetic polypeptide
  XENP018349 1G6_H1_L1.6_IgG1_PVA_/S267K Light Chain
SIVMTQSPKTLSVSPGERATLSCRASQSVSNDVAWYQQKPGQSPRLLINYASHRYTGVPDRFTGSGYGTEFTLTISSLQSEDFAVYFCQQDYSSPRTFGGGTKVEIKRTVAAPSVFIFPPSDEQLKSGTASVVCLLNNFYPREAKVQWKVDNALQSGNSQESVTEQDSKDSTYSLSSTLTLSKADYEKHKVYACEVTHQGLSSPVTKSFNRGEC

SEQ ID NO: 18837 - protein, 107 aa, Artificial Sequence; identical to SEQ ID NO: 13224
  Description of Artificial Sequence: Synthetic polypeptide
  VL of XENP018349

SEQ ID NO: 18838 - protein, 11 aa, Artificial Sequence
  Description of Artificial Sequence: Synthetic peptide
  XENP018349 vlCDR1
RASQSVSNDVA

SEQ ID NO: 18839 - protein, 7 aa, Artificial Sequence
  Description of Artificial Sequence: Synthetic peptide
  XENP018349 vlCDR2
YASHRYT

SEQ ID NO: 18840 - protein, 9 aa, Artificial Sequence
  Description of Artificial Sequence: Synthetic peptide
  XENP018349 vlCDR3
QQDYSSPRT

SEQ ID NO: 18841 - protein, 451 aa, Artificial Sequence; identical to SEQ ID NO: 16221
  Description of Artificial Sequence: Synthetic polypeptide
  XENP018350 1G6_H1_L1.7_IgG1_PVA_/S267K Heavy Chain

SEQ ID NO: 18842 - protein, 122 aa, Artificial Sequence; identical to SEQ ID NO: 10922
  Description of Artificial Sequence: Synthetic polypeptide
  VH of XENP018350

SEQ ID NO: 18843 - protein, 5 aa, Artificial Sequence
  Description of Artificial Sequence: Synthetic peptide
  XENP018350 vhCDR1
NYWMN

SEQ ID NO: 18844 - protein, 19 aa, Artificial Sequence
  Description of Artificial Sequence: Synthetic peptide
  XENP018350 vhCDR2
EIRLKSNNYATHYAEPVKG

SEQ ID NO: 18845 - protein, 11 aa, Artificial Sequence
  Description of Artificial Sequence: Synthetic peptide
  XENP018350 vhCDR3
YYGNYGGYFDV

SEQ ID NO: 18846 - protein, 214 aa, Artificial Sequence
  Description of Artificial Sequence: Synthetic polypeptide
  XENP018350 1G6_H1_L1.7_IgG1_PVA_/S267K Light Chain
SIVMTQSPASLSVSPGERATLSCRASQSVSNDVAWYQQKPGQSPRLLINYASHRYTGVPDRFTGSGYGTEFTLTISSLQSEDFAVYFCQQDYSSPRTFGGGTKVEIKRTVAAPSVFIFPPSDEQLKSGTASVVCLLNNFYPREAKVQWKVDNALQSGNSQESVTEQDSKDSTYSLSSTLTLSKADYEKHKVYACEVTHQGLSSPVTKSFNRGEC

SEQ ID NO: 18847 - protein, 107 aa, Artificial Sequence; identical to SEQ ID NO: 13233
  Description of Artificial Sequence: Synthetic polypeptide
  VL of XENP018350

SEQ ID NO: 18848 - protein, 11 aa, Artificial Sequence
  Description of Artificial Sequence: Synthetic peptide
  XENP018350 vlCDR1
RASQSVSNDVA

SEQ ID NO: 18849 - protein, 7 aa, Artificial Sequence
  Description of Artificial Sequence: Synthetic peptide
  XENP018350 vlCDR2
YASHRYT

SEQ ID NO: 18850 - protein, 9 aa, Artificial Sequence
  Description of Artificial Sequence: Synthetic peptide
  XENP018350 vlCDR3
QQDYSSPRT

SEQ ID NO: 18851 - protein, 451 aa, Artificial Sequence; identical to SEQ ID NO: 16221
  Description of Artificial Sequence: Synthetic polypeptide
  XENP018351 1G6_H1_L1.8_IgG1_PVA_/S267K Heavy Chain

SEQ ID NO: 18852 - protein, 122 aa, Artificial Sequence; identical to SEQ ID NO: 10922
  Description of Artificial Sequence: Synthetic polypeptide
  VH of XENP018351

SEQ ID NO: 18853 - protein, 5 aa, Artificial Sequence
  Description of Artificial Sequence: Synthetic peptide
  XENP018351 vhCDR1
NYWMN

SEQ ID NO: 18854 - protein, 19 aa, Artificial Sequence
  Description of Artificial Sequence: Synthetic peptide
  XENP018351 vhCDR2
EIRLKSNNYATHYAEPVKG

SEQ ID NO: 18855 - protein, 11 aa, Artificial Sequence
  Description of Artificial Sequence: Synthetic peptide
  XENP018351 vhCDR3
YYGNYGGYFDV

SEQ ID NO: 18856 - protein, 214 aa, Artificial Sequence
  Description of Artificial Sequence: Synthetic polypeptide
  XENP018351 1G6_H1_L1.8_IgG1_PVA_/S267K Light Chain
SIVMTQSPAFLSVSPGERATLSCRASQSVSNDVAWYQQKPGQSPRLLINYASHRYTGVPDRFTGSGYGTEFTLTISSLQSEDFAVYFCQQDYSSPRTFGGGTKVEIKRTVAAPSVFIFPPSDEQLKSGTASVVCLLNNFYPREAKVQWKVDNALQSGNSQESVTEQDSKDSTYSLSSTLTLSKADYEKHKVYACEVTHQGLSSPVTKSFNRGEC

SEQ ID NO: 18857 - protein, 107 aa, Artificial Sequence; identical to SEQ ID NO: 13242
  Description of Artificial Sequence: Synthetic polypeptide
  VL of XENP018351

SEQ ID NO: 18858 - protein, 11 aa, Artificial Sequence
  Description of Artificial Sequence: Synthetic peptide
  XENP018351 vlCDR1
RASQSVSNDVA

SEQ ID NO: 18859 - protein, 7 aa, Artificial Sequence
  Description of Artificial Sequence: Synthetic peptide
  XENP018351 vlCDR2
YASHRYT

SEQ ID NO: 18860 - protein, 9 aa, Artificial Sequence
  Description of Artificial Sequence: Synthetic peptide
  XENP018351 vlCDR3
QQDYSSPRT

SEQ ID NO: 18861 - protein, 451 aa, Artificial Sequence; identical to SEQ ID NO: 16221
  Description of Artificial Sequence: Synthetic polypeptide
  XENP018352 1G6_H1_L1.9_IgG1_PVA_/S267K Heavy Chain

SEQ ID NO: 18862 - protein, 122 aa, Artificial Sequence; identical to SEQ ID NO: 10922
  Description of Artificial Sequence: Synthetic polypeptide
  VH of XENP018352

SEQ ID NO: 18863 - protein, 5 aa, Artificial Sequence
  Description of Artificial Sequence: Synthetic peptide
  XENP018352 vhCDR1
NYWMN

SEQ ID NO: 18864 - protein, 19 aa, Artificial Sequence
  Description of Artificial Sequence: Synthetic peptide
  XENP018352 vhCDR2
EIRLKSNNYATHYAEPVKG

SEQ ID NO: 18865 - protein, 11 aa, Artificial Sequence
  Description of Artificial Sequence: Synthetic peptide
  XENP018352 vhCDR3
YYGNYGGYFDV

SEQ ID NO: 18866 - protein, 214 aa, Artificial Sequence
  Description of Artificial Sequence: Synthetic polypeptide
  XENP018352 1G6_H1_L1.9_IgG1_PVA_/S267K Light Chain
SIVMTQSPATLLVSPGERATLSCRASQSVSNDVAWYQQKPGQSPRLLINYASHRYTGVPDRFTGSGYGTEFTLTISSLQSEDFAVYFCQQDYSSPRTFGGGTKVEIKRTVAAPSVFIFPPSDEQLKSGTASVVCLLNNFYPREAKVQWKVDNALQSGNSQESVTEQDSKDSTYSLSSTLTLSKADYEKHKVYACEVTHQGLSSPVTKSFNRGEC

SEQ ID NO: 18867 - protein, 107 aa, Artificial Sequence; identical to SEQ ID NO: 13251
  Description of Artificial Sequence: Synthetic polypeptide
  VL of XENP018352

SEQ ID NO: 18868 - protein, 11 aa, Artificial Sequence
  Description of Artificial Sequence: Synthetic peptide
  XENP018352 vlCDR1
RASQSVSNDVA

SEQ ID NO: 18869 - protein, 7 aa, Artificial Sequence
  Description of Artificial Sequence: Synthetic peptide
  XENP018352 vlCDR2
YASHRYT

SEQ ID NO: 18870 - protein, 9 aa, Artificial Sequence
  Description of Artificial Sequence: Synthetic peptide
  XENP018352 vlCDR3
QQDYSSPRT

SEQ ID NO: 18871 - protein, 451 aa, Artificial Sequence; identical to SEQ ID NO: 16221
  Description of Artificial Sequence: Synthetic polypeptide
  XENP018353 1G6_H1_L1.10_IgG1_PVA_/S267K Heavy Chain

SEQ ID NO: 18872 - protein, 122 aa, Artificial Sequence; identical to SEQ ID NO: 10922
  Description of Artificial Sequence: Synthetic polypeptide
  VH of XENP018353

SEQ ID NO: 18873 - protein, 5 aa, Artificial Sequence
  Description of Artificial Sequence: Synthetic peptide
  XENP018353 vhCDR1
NYWMN

SEQ ID NO: 18874 - protein, 19 aa, Artificial Sequence
  Description of Artificial Sequence: Synthetic peptide
  XENP018353 vhCDR2
EIRLKSNNYATHYAEPVKG

SEQ ID NO: 18875 - protein, 11 aa, Artificial Sequence
  Description of Artificial Sequence: Synthetic peptide
  XENP018353 vhCDR3
YYGNYGGYFDV

SEQ ID NO: 18876 - protein, 214 aa, Artificial Sequence
  Description of Artificial Sequence: Synthetic polypeptide
  XENP018353 1G6_H1_L1.10_IgG1_PVA_/S267K Light Chain
SIVMTQSPATLSVSAGERATLSCRASQSVSNDVAWYQQKPGQSPRLLINYASHRYTGVPDRFTGSGYGTEFTLTISSLQSEDFAVYFCQQDYSSPRTFGGGTKVEIKRTVAAPSVFIFPPSDEQLKSGTASVVCLLNNFYPREAKVQWKVDNALQSGNSQESVTEQDSKDSTYSLSSTLTLSKADYEKHKVYACEVTHQGLSSPVTKSFNRGEC

SEQ ID NO: 18877 - protein, 107 aa, Artificial Sequence; identical to SEQ ID NO: 13260
  Description of Artificial Sequence: Synthetic polypeptide
  VL of XENP018353

SEQ ID NO: 18878 - protein, 11 aa, Artificial Sequence
  Description of Artificial Sequence: Synthetic peptide
  XENP018353 vlCDR1
RASQSVSNDVA

SEQ ID NO: 18879 - protein, 7 aa, Artificial Sequence
  Description of Artificial Sequence: Synthetic peptide
  XENP018353 vlCDR2
YASHRYT

SEQ ID NO: 18880 - protein, 9 aa, Artificial Sequence
  Description of Artificial Sequence: Synthetic peptide
  XENP018353 vlCDR3
QQDYSSPRT

SEQ ID NO: 18881 - protein, 451 aa, Artificial Sequence; identical to SEQ ID NO: 16221
  Description of Artificial Sequence: Synthetic polypeptide
  XENP018354 1G6_H1_L1.11_IgG1_PVA_/S267K Heavy Chain

SEQ ID NO: 18882 - protein, 122 aa, Artificial Sequence; identical to SEQ ID NO: 10922
  Description of Artificial Sequence: Synthetic polypeptide
  VH of XENP018354

SEQ ID NO: 18883 - protein, 5 aa, Artificial Sequence
  Description of Artificial Sequence: Synthetic peptide
  XENP018354 vhCDR1
NYWMN

SEQ ID NO: 18884 - protein, 19 aa, Artificial Sequence
  Description of Artificial Sequence: Synthetic peptide
  XENP018354 vhCDR2
EIRLKSNNYATHYAEPVKG

SEQ ID NO: 18885 - protein, 11 aa, Artificial Sequence
  Description of Artificial Sequence: Synthetic peptide
  XENP018354 vhCDR3
YYGNYGGYFDV

SEQ ID NO: 18886 - protein, 214 aa, Artificial Sequence
  Description of Artificial Sequence: Synthetic polypeptide
  XENP018354 1G6_H1_L1.11_IgG1_PVA_/S267K Light Chain
SIVMTQSPATLSVSPGDRATLSCRASQSVSNDVAWYQQKPGQSPRLLINYASHRYTGVPDRFTGSGYGTEFTLTISSLQSEDFAVYFCQQDYSSPRTFGGGTKVEIKRTVAAPSVFIFPPSDEQLKSGTASVVCLLNNFYPREAKVQWKVDNALQSGNSQESVTEQDSKDSTYSLSSTLTLSKADYEKHKVYACEVTHQGLSSPVTKSFNRGEC

SEQ ID NO: 18887 - protein, 107 aa, Artificial Sequence; identical to SEQ ID NO: 13269
  Description of Artificial Sequence: Synthetic polypeptide
  VL of XENP018354

SEQ ID NO: 18888 - protein, 11 aa, Artificial Sequence
  Description of Artificial Sequence: Synthetic peptide
  XENP018354 vlCDR1
RASQSVSNDVA

SEQ ID NO: 18889 - protein, 7 aa, Artificial Sequence
  Description of Artificial Sequence: Synthetic peptide
  XENP018354 vlCDR2
YASHRYT

SEQ ID NO: 18890 - protein, 9 aa, Artificial Sequence
  Description of Artificial Sequence: Synthetic peptide
  XENP018354 vlCDR3
QQDYSSPRT

SEQ ID NO: 18891 - protein, 451 aa, Artificial Sequence; identical to SEQ ID NO: 16221
  Description of Artificial Sequence: Synthetic polypeptide
  XENP018355 1G6_H1_L1.12_IgG1_PVA_/S267K Heavy Chain

SEQ ID NO: 18892 - protein, 122 aa, Artificial Sequence; identical to SEQ ID NO: 10922
  Description of Artificial Sequence: Synthetic polypeptide
  VH of XENP018355

SEQ ID NO: 18893 - protein, 5 aa, Artificial Sequence
  Description of Artificial Sequence: Synthetic peptide
  XENP018355 vhCDR1
NYWMN

SEQ ID NO: 18894 - protein, 19 aa, Artificial Sequence
  Description of Artificial Sequence: Synthetic peptide
  XENP018355 vhCDR2
EIRLKSNNYATHYAEPVKG

SEQ ID NO: 18895 - protein, 11 aa, Artificial Sequence
  Description of Artificial Sequence: Synthetic peptide
  XENP018355 vhCDR3
YYGNYGGYFDV

SEQ ID NO: 18896 - protein, 214 aa, Artificial Sequence
  Description of Artificial Sequence: Synthetic polypeptide
  XENP018355 1G6_H1_L1.12_IgG1_PVA_/S267K Light Chain
SIVMTQSPATLSVSPGERVTLSCRASQSVSNDVAWYQQKPGQSPRLLINYASHRYTGVPDRFTGSGYGTEFTLTISSLQSEDFAVYFCQQDYSSPRTFGGGTKVEIKRTVAAPSVFIFPPSDEQLKSGTASVVCLLNNFYPREAKVQWKVDNALQSGNSQESVTEQDSKDSTYSLSSTLTLSKADYEKHKVYACEVTHQGLSSPVTKSFNRGEC

SEQ ID NO: 18897 - protein, 107 aa, Artificial Sequence; identical to SEQ ID NO: 13278
  Description of Artificial Sequence: Synthetic polypeptide
  VL of XENP018355

SEQ ID NO: 18898 - protein, 11 aa, Artificial Sequence
  Description of Artificial Sequence: Synthetic peptide
  XENP018355 vlCDR1
RASQSVSNDVA

SEQ ID NO: 18899 - protein, 7 aa, Artificial Sequence
  Description of Artificial Sequence: Synthetic peptide
  XENP018355 vlCDR2
YASHRYT

SEQ ID NO: 18900 - protein, 9 aa, Artificial Sequence
  Description of Artificial Sequence: Synthetic peptide
  XENP018355 vlCDR3
QQDYSSPRT

SEQ ID NO: 18901 - protein, 451 aa, Artificial Sequence; identical to SEQ ID NO: 16221
  Description of Artificial Sequence: Synthetic polypeptide
  XENP018356 1G6_H1_L1.13_IgG1_PVA_/S267K Heavy Chain

SEQ ID NO: 18902 - protein, 122 aa, Artificial Sequence; identical to SEQ ID NO: 10922
  Description of Artificial Sequence: Synthetic polypeptide
  VH of XENP018356

SEQ ID NO: 18903 - protein, 5 aa, Artificial Sequence
  Description of Artificial Sequence: Synthetic peptide
  XENP018356 vhCDR1
NYWMN

SEQ ID NO: 18904 - protein, 19 aa, Artificial Sequence
  Description of Artificial Sequence: Synthetic peptide
  XENP018356 vhCDR2
EIRLKSNNYATHYAEPVKG

SEQ ID NO: 18905 - protein, 11 aa, Artificial Sequence
  Description of Artificial Sequence: Synthetic peptide
  XENP018356 vhCDR3
YYGNYGGYFDV

SEQ ID NO: 18906 - protein, 214 aa, Artificial Sequence
  Description of Artificial Sequence: Synthetic polypeptide
  XENP018356 1G6_H1_L1.13_IgG1_PVA_/S267K Light Chain
SIVMTQSPATLSVSPGERATISCRASQSVSNDVAWYQQKPGQSPRLLINYASHRYTGVPDRFTGSGYGTEFTLTISSLQSEDFAVYFCQQDYSSPRTFGGGTKVEIKRTVAAPSVFIFPPSDEQLKSGTASVVCLLNNFYPREAKVQWKVDNALQSGNSQESVTEQDSKDSTYSLSSTLTLSKADYEKHKVYACEVTHQGLSSPVTKSFNRGEC

SEQ ID NO: 18907 - protein, 107 aa, Artificial Sequence; identical to SEQ ID NO: 13287
  Description of Artificial Sequence: Synthetic polypeptide
  VL of XENP018356

SEQ ID NO: 18908 - protein, 11 aa, Artificial Sequence
  Description of Artificial Sequence: Synthetic peptide
  XENP018356 vlCDR1
RASQSVSNDVA

SEQ ID NO: 18909 - protein, 7 aa, Artificial Sequence
  Description of Artificial Sequence: Synthetic peptide
  XENP018356 vlCDR2
YASHRYT

SEQ ID NO: 18910 - protein, 9 aa, Artificial Sequence
  Description of Artificial Sequence: Synthetic peptide
  XENP018356 vlCDR3
QQDYSSPRT

SEQ ID NO: 18911 - protein, 451 aa, Artificial Sequence; identical to SEQ ID NO: 16221
  Description of Artificial Sequence: Synthetic polypeptide
  XENP018357 1G6_H1_L1.14_IgG1_PVA_/S267K Heavy Chain

SEQ ID NO: 18912 - protein, 122 aa, Artificial Sequence; identical to SEQ ID NO: 10922
  Description of Artificial Sequence: Synthetic polypeptide
  VH of XENP018357

SEQ ID NO: 18913 - protein, 5 aa, Artificial Sequence
  Description of Artificial Sequence: Synthetic peptide
  XENP018357 vhCDR1
NYWMN

SEQ ID NO: 18914 - protein, 19 aa, Artificial Sequence
  Description of Artificial Sequence: Synthetic peptide
  XENP018357 vhCDR2
EIRLKSNNYATHYAEPVKG

SEQ ID NO: 18915 - protein, 11 aa, Artificial Sequence
  Description of Artificial Sequence: Synthetic peptide
  XENP018357 vhCDR3
YYGNYGGYFDV

SEQ ID NO: 18916 - protein, 214 aa, Artificial Sequence
  Description of Artificial Sequence: Synthetic polypeptide
  XENP018357 1G6_H1_L1.14_IgG1_PVA_/S267K Light Chain
SIVMTQSPATLSVSPGERATLTCRASQSVSNDVAWYQQKPGQSPRLLINYASHRYTGVPDRFTGSGYGTEFTLTISSLQSEDFAVYFCQQDYSSPRTFGGGTKVEIKRTVAAPSVFIFPPSDEQLKSGTASVVCLLNNFYPREAKVQWKVDNALQSGNSQESVTEQDSKDSTYSLSSTLTLSKADYEKHKVYACEVTHQGLSSPVTKSFNRGEC

SEQ ID NO: 18917 - protein, 107 aa, Artificial Sequence; identical to SEQ ID NO: 13296
  Description of Artificial Sequence: Synthetic polypeptide
  VL of XENP018357

SEQ ID NO: 18918 - protein, 11 aa, Artificial Sequence
  Description of Artificial Sequence: Synthetic peptide
  XENP018357 vlCDR1
RASQSVSNDVA

SEQ ID NO: 18919 - protein, 7 aa, Artificial Sequence
  Description of Artificial Sequence: Synthetic peptide
  XENP018357 vlCDR2
YASHRYT

SEQ ID NO: 18920 - protein, 9 aa, Artificial Sequence
  Description of Artificial Sequence: Synthetic peptide
  XENP018357 vlCDR3
QQDYSSPRT

SEQ ID NO: 18921 - protein, 451 aa, Artificial Sequence; identical to SEQ ID NO: 16221
  Description of Artificial Sequence: Synthetic polypeptide
  XENP018358 1G6_H1_L1.15_IgG1_PVA_/S267K Heavy Chain

SEQ ID NO: 18922 - protein, 122 aa, Artificial Sequence; identical to SEQ ID NO: 10922
  Description of Artificial Sequence: Synthetic polypeptide
  VH of XENP018358

SEQ ID NO: 18923 - protein, 5 aa, Artificial Sequence
  Description of Artificial Sequence: Synthetic peptide
  XENP018358 vhCDR1
NYWMN

SEQ ID NO: 18924 - protein, 19 aa, Artificial Sequence
  Description of Artificial Sequence: Synthetic peptide
  XENP018358 vhCDR2
EIRLKSNNYATHYAEPVKG

SEQ ID NO: 18925 - protein, 11 aa, Artificial Sequence
  Description of Artificial Sequence: Synthetic peptide
  XENP018358 vhCDR3
YYGNYGGYFDV

SEQ ID NO: 18926 - protein, 214 aa, Artificial Sequence
  Description of Artificial Sequence: Synthetic polypeptide
  XENP018358 1G6_H1_L1.15_IgG1_PVA_/S267K Light Chain
SIVMTQSPATLSVSPGERATLSCKASQSVSNDVAWYQQKPGQSPRLLINYASHRYTGVPDRFTGSGYGTEFTLTISSLQSEDFAVYFCQQDYSSPRTFGGGTKVEIKRTVAAPSVFIFPPSDEQLKSGTASVVCLLNNFYPREAKVQWKVDNALQSGNSQESVTEQDSKDSTYSLSSTLTLSKADYEKHKVYACEVTHQGLSSPVTKSFNRGEC

SEQ ID NO: 18927 - protein, 107 aa, Artificial Sequence; identical to SEQ ID NO: 13305
  Description of Artificial Sequence: Synthetic polypeptide
  VL of XENP018358

SEQ ID NO: 18928 - protein, 11 aa, Artificial Sequence
  Description of Artificial Sequence: Synthetic peptide
  XENP018358 vlCDR1
KASQSVSNDVA

SEQ ID NO: 18929 - protein, 7 aa, Artificial Sequence
  Description of Artificial Sequence: Synthetic peptide
  XENP018358 vlCDR2
YASHRYT

SEQ ID NO: 18930 - protein, 9 aa, Artificial Sequence
  Description of Artificial Sequence: Synthetic peptide
  XENP018358 vlCDR3
QQDYSSPRT

SEQ ID NO: 18931 - protein, 451 aa, Artificial Sequence; identical to SEQ ID NO: 16221
  Description of Artificial Sequence: Synthetic polypeptide
  XENP018359 1G6_H1_L1.16_IgG1_PVA_/S267K Heavy Chain

SEQ ID NO: 18932 - protein, 122 aa, Artificial Sequence; identical to SEQ ID NO: 10922
  Description of Artificial Sequence: Synthetic polypeptide
  VH of XENP018359

SEQ ID NO: 18933 - protein, 5 aa, Artificial Sequence
  Description of Artificial Sequence: Synthetic peptide
  XENP018359 vhCDR1
NYWMN

SEQ ID NO: 18934 - protein, 19 aa, Artificial Sequence
  Description of Artificial Sequence: Synthetic peptide
  XENP018359 vhCDR2
EIRLKSNNYATHYAEPVKG

SEQ ID NO: 18935 - protein, 11 aa, Artificial Sequence
  Description of Artificial Sequence: Synthetic peptide
  XENP018359 vhCDR3
YYGNYGGYFDV

SEQ ID NO: 18936 - protein, 214 aa, Artificial Sequence
  Description of Artificial Sequence: Synthetic polypeptide
  XENP018359 1G6_H1_L1.16_IgG1_PVA_/S267K Light Chain
SIVMTQSPATLSVSPGERATLSCRASQDVSNDVAWYQQKPGQSPRLLINYASHRYTGVPDRFTGSGYGTEFTLTISSLQSEDFAVYFCQQDYSSPRTFGGGTKVEIKRTVAAPSVFIFPPSDEQLKSGTASVVCLLNNFYPREAKVQWKVDNALQSGNSQESVTEQDSKDSTYSLSSTLTLSKADYEKHKVYACEVTHQGLSSPVTKSFNRGEC

SEQ ID NO: 18937 - protein, 107 aa, Artificial Sequence; identical to SEQ ID NO: 13314
  Description of Artificial Sequence: Synthetic polypeptide
  VL of XENP018359

SEQ ID NO: 18938 - protein, 11 aa, Artificial Sequence
  Description of Artificial Sequence: Synthetic peptide
  XENP018359 vlCDR1
RASQDVSNDVA

SEQ ID NO: 18939 - protein, 7 aa, Artificial Sequence
  Description of Artificial Sequence: Synthetic peptide
  XENP018359 vlCDR2
YASHRYT

SEQ ID NO: 18940 - protein, 9 aa, Artificial Sequence
  Description of Artificial Sequence: Synthetic peptide
  XENP018359 vlCDR3
QQDYSSPRT

SEQ ID NO: 18941 - protein, 451 aa, Artificial Sequence; identical to SEQ ID NO: 16221
  Description of Artificial Sequence: Synthetic polypeptide
  XENP018360 1G6_H1_L1.17_IgG1_PVA_/S267K Heavy Chain

SEQ ID NO: 18942 - protein, 122 aa, Artificial Sequence; identical to SEQ ID NO: 10922
  Description of Artificial Sequence: Synthetic polypeptide
  VH of XENP018360

SEQ ID NO: 18943 - protein, 5 aa, Artificial Sequence
  Description of Artificial Sequence: Synthetic peptide
  XENP018360 vhCDR1
NYWMN

SEQ ID NO: 18944 - protein, 19 aa, Artificial Sequence
  Description of Artificial Sequence: Synthetic peptide
  XENP018360 vhCDR2
EIRLKSNNYATHYAEPVKG

SEQ ID NO: 18945 - protein, 11 aa, Artificial Sequence
  Description of Artificial Sequence: Synthetic peptide
  XENP018360 vhCDR3
YYGNYGGYFDV

SEQ ID NO: 18946 - protein, 214 aa, Artificial Sequence
  Description of Artificial Sequence: Synthetic polypeptide
  XENP018360 1G6_H1_L1.17_IgG1_PVA_/S267K Light Chain
SIVMTQSPATLSVSPGERATLSCRASQGVSNDVAWYQQKPGQSPRLLINYASHRYTGVPDRFTGSGYGTEFTLTISSLQSEDFAVYFCQQDYSSPRTFGGGTKVEIKRTVAAPSVFIFPPSDEQLKSGTASVVCLLNNFYPREAKVQWKVDNALQSGNSQESVTEQDSKDSTYSLSSTLTLSKADYEKHKVYACEVTHQGLSSPVTKSFNRGEC

SEQ ID NO: 18947 - protein, 107 aa, Artificial Sequence; identical to SEQ ID NO: 13323
  Description of Artificial Sequence: Synthetic polypeptide
  VL of XENP018360

SEQ ID NO: 18948 - protein, 11 aa, Artificial Sequence
  Description of Artificial Sequence: Synthetic peptide
  XENP018360 vlCDR1
RASQGVSNDVA

SEQ ID NO: 18949 - protein, 7 aa, Artificial Sequence
  Description of Artificial Sequence: Synthetic peptide
  XENP018360 vlCDR2
YASHRYT

SEQ ID NO: 18950 - protein, 9 aa, Artificial Sequence
  Description of Artificial Sequence: Synthetic peptide
  XENP018360 vlCDR3
QQDYSSPRT

SEQ ID NO: 18951 - protein, 451 aa, Artificial Sequence; identical to SEQ ID NO: 16221
  Description of Artificial Sequence: Synthetic polypeptide
  XENP018361 1G6_H1_L1.18_IgG1_PVA_/S267K Heavy Chain

SEQ ID NO: 18952 - protein, 122 aa, Artificial Sequence; identical to SEQ ID NO: 10922
  Description of Artificial Sequence: Synthetic polypeptide
  VH of XENP018361

SEQ ID NO: 18953 - protein, 5 aa, Artificial Sequence
  Description of Artificial Sequence: Synthetic peptide
  XENP018361 vhCDR1
NYWMN

SEQ ID NO: 18954 - protein, 19 aa, Artificial Sequence
  Description of Artificial Sequence: Synthetic peptide
  XENP018361 vhCDR2
EIRLKSNNYATHYAEPVKG

SEQ ID NO: 18955 - protein, 11 aa, Artificial Sequence
  Description of Artificial Sequence: Synthetic peptide
  XENP018361 vhCDR3
YYGNYGGYFDV

SEQ ID NO: 18956 - protein, 214 aa, Artificial Sequence
  Description of Artificial Sequence: Synthetic polypeptide
  XENP018361 1G6_H1_L1.18_IgG1_PVA_/S267K Light Chain
SIVMTQSPATLSVSPGERATLSCRASQSISNDVAWYQQKPGQSPRLLINYASHRYTGVPDRFTGSGYGTEFTLTISSLQSEDFAVYFCQQDYSSPRTFGGGTKVEIKRTVAAPSVFIFPPSDEQLKSGTASVVCLLNNFYPREAKVQWKVDNALQSGNSQESVTEQDSKDSTYSLSSTLTLSKADYEKHKVYACEVTHQGLSSPVTKSFNRGEC

SEQ ID NO: 18957 - protein, 107 aa, Artificial Sequence; identical to SEQ ID NO: 13332
  Description of Artificial Sequence: Synthetic polypeptide
  VL of XENP018361

SEQ ID NO: 18958 - protein, 11 aa, Artificial Sequence
  Description of Artificial Sequence: Synthetic peptide
  XENP018361 vlCDR1
RASQSISNDVA

SEQ ID NO: 18959 - protein, 7 aa, Artificial Sequence
  Description of Artificial Sequence: Synthetic peptide
  XENP018361 vlCDR2
YASHRYT

SEQ ID NO: 18960 - protein, 9 aa, Artificial Sequence
  Description of Artificial Sequence: Synthetic peptide
  XENP018361 vlCDR3
QQDYSSPRT

SEQ ID NO: 18961 - protein, 451 aa, Artificial Sequence; identical to SEQ ID NO: 16221
  Description of Artificial Sequence: Synthetic polypeptide
  XENP018362 1G6_H1_L1.19_IgG1_PVA_/S267K Heavy Chain

SEQ ID NO: 18962 - protein, 122 aa, Artificial Sequence; identical to SEQ ID NO: 10922
  Description of Artificial Sequence: Synthetic polypeptide
  VH of XENP018362

SEQ ID NO: 18963 - protein, 5 aa, Artificial Sequence
  Description of Artificial Sequence: Synthetic peptide
  XENP018362 vhCDR1
NYWMN

SEQ ID NO: 18964 - protein, 19 aa, Artificial Sequence
  Description of Artificial Sequence: Synthetic peptide
  XENP018362 vhCDR2
EIRLKSNNYATHYAEPVKG

SEQ ID NO: 18965 - protein, 11 aa, Artificial Sequence
  Description of Artificial Sequence: Synthetic peptide
  XENP018362 vhCDR3
YYGNYGGYFDV

SEQ ID NO: 18966 - protein, 214 aa, Artificial Sequence
  Description of Artificial Sequence: Synthetic polypeptide
  XENP018362 1G6_H1_L1.19_IgG1_PVA_/S267K Light Chain
SIVMTQSPATLSVSPGERATLSCRASQSLSNDVAWYQQKPGQSPRLLINYASHRYTGVPDRFTGSGYGTEFTLTISSLQSEDFAVYFCQQDYSSPRTFGGGTKVEIKRTVAAPSVFIFPPSDEQLKSGTASVVCLLNNFYPREAKVQWKVDNALQSGNSQESVTEQDSKDSTYSLSSTLTLSKADYEKHKVYACEVTHQGLSSPVTKSFNRGEC

SEQ ID NO: 18967 - protein, 107 aa, Artificial Sequence; identical to SEQ ID NO: 13341
  Description of Artificial Sequence: Synthetic polypeptide
  VL of XENP018362

SEQ ID NO: 18968 - protein, 11 aa, Artificial Sequence
  Description of Artificial Sequence: Synthetic peptide
  XENP018362 vlCDR1
RASQSLSNDVA

SEQ ID NO: 18969 - protein, 7 aa, Artificial Sequence
  Description of Artificial Sequence: Synthetic peptide
  XENP018362 vlCDR2
YASHRYT

SEQ ID NO: 18970 - protein, 9 aa, Artificial Sequence
  Description of Artificial Sequence: Synthetic peptide
  XENP018362 vlCDR3
QQDYSSPRT

SEQ ID NO: 18971 - protein, 451 aa, Artificial Sequence; identical to SEQ ID NO: 16221
  Description of Artificial Sequence: Synthetic polypeptide
  XENP018363 1G6_H1_L1.20_IgG1_PVA_/S267K Heavy Chain

SEQ ID NO: 18972 - protein, 122 aa, Artificial Sequence; identical to SEQ ID NO: 10922
  Description of Artificial Sequence: Synthetic polypeptide
  VH of XENP018363

SEQ ID NO: 18973 - protein, 5 aa, Artificial Sequence
  Description of Artificial Sequence: Synthetic peptide
  XENP018363 vhCDR1
NYWMN

SEQ ID NO: 18974 - protein, 19 aa, Artificial Sequence
  Description of Artificial Sequence: Synthetic peptide
  XENP018363 vhCDR2
EIRLKSNNYATHYAEPVKG

SEQ ID NO: 18975 - protein, 11 aa, Artificial Sequence
  Description of Artificial Sequence: Synthetic peptide
  XENP018363 vhCDR3
YYGNYGGYFDV

SEQ ID NO: 18976 - protein, 214 aa, Artificial Sequence
  Description of Artificial Sequence: Synthetic polypeptide
  XENP018363 1G6_H1_L1.20_IgG1_PVA_/S267K Light Chain
SIVMTQSPATLSVSPGERATLSCRASQSVTNDVAWYQQKPGQSPRLLINYASHRYTGVPDRFTGSGYGTEFTLTISSLQSEDFAVYFCQQDYSSPRTFGGGTKVEIKRTVAAPSVFIFPPSDEQLKSGTASVVCLLNNFYPREAKVQWKVDNALQSGNSQESVTEQDSKDSTYSLSSTLTLSKADYEKHKVYACEVTHQGLSSPVTKSFNRGEC

SEQ ID NO: 18977 - protein, 107 aa, Artificial Sequence; identical to SEQ ID NO: 13350
  Description of Artificial Sequence: Synthetic polypeptide
  VL of XENP018363

SEQ ID NO: 18978 - protein, 11 aa, Artificial Sequence
  Description of Artificial Sequence: Synthetic peptide
  XENP018363 vlCDR1
RASQSVTNDVA

SEQ ID NO: 18979 - protein, 7 aa, Artificial Sequence
  Description of Artificial Sequence: Synthetic peptide
  XENP018363 vlCDR2
YASHRYT

SEQ ID NO: 18980 - protein, 9 aa, Artificial Sequence
  Description of Artificial Sequence: Synthetic peptide
  XENP018363 vlCDR3
QQDYSSPRT

SEQ ID NO: 18981 - protein, 451 aa, Artificial Sequence; identical to SEQ ID NO: 16221
  Description of Artificial Sequence: Synthetic polypeptide
  XENP018364 1G6_H1_L1.21_IgG1_PVA_/S267K Heavy Chain

SEQ ID NO: 18982 - protein, 122 aa, Artificial Sequence; identical to SEQ ID NO: 10922
  Description of Artificial Sequence: Synthetic polypeptide
  VH of XENP018364

SEQ ID NO: 18983 - protein, 5 aa, Artificial Sequence
  Description of Artificial Sequence: Synthetic peptide
  XENP018364 vhCDR1
NYWMN

SEQ ID NO: 18984 - protein, 19 aa, Artificial Sequence
  Description of Artificial Sequence: Synthetic peptide
  XENP018364 vhCDR2
EIRLKSNNYATHYAEPVKG

SEQ ID NO: 18985 - protein, 11 aa, Artificial Sequence
  Description of Artificial Sequence: Synthetic peptide
  XENP018364 vhCDR3
YYGNYGGYFDV

SEQ ID NO: 18986 - protein, 214 aa, Artificial Sequence
  Description of Artificial Sequence: Synthetic polypeptide
  XENP018364 1G6_H1_L1.21_IgG1_PVA_/S267K Light Chain
SIVMTQSPATLSVSPGERATLSCRASQSVANDVAWYQQKPGQSPRLLINYASHRYTGVPDRFTGSGYGTEFTLTISSLQSEDFAVYFCQQDYSSPRTFGGGTKVEIKRTVAAPSVFIFPPSDEQLKSGTASVVCLLNNFYPREAKVQWKVDNALQSGNSQESVTEQDSKDSTYSLSSTLTLSKADYEKHKVYACEVTHQGLSSPVTKSFNRGEC

SEQ ID NO: 18987 - protein, 107 aa, Artificial Sequence; identical to SEQ ID NO: 13359
  Description of Artificial Sequence: Synthetic polypeptide
  VL of XENP018364

SEQ ID NO: 18988 - protein, 11 aa, Artificial Sequence
  Description of Artificial Sequence: Synthetic peptide
  XENP018364 vlCDR1
RASQSVANDVA

SEQ ID NO: 18989 - protein, 7 aa, Artificial Sequence
  Description of Artificial Sequence: Synthetic peptide
  XENP018364 vlCDR2
YASHRYT

SEQ ID NO: 18990 - protein, 9 aa, Artificial Sequence
  Description of Artificial Sequence: Synthetic peptide
  XENP018364 vlCDR3
QQDYSSPRT

SEQ ID NO: 18991 - protein, 451 aa, Artificial Sequence; identical to SEQ ID NO: 16221
  Description of Artificial Sequence: Synthetic polypeptide
  XENP018365 1G6_H1_L1.22_IgG1_PVA_/S267K Heavy Chain

SEQ ID NO: 18992 - protein, 122 aa, Artificial Sequence; identical to SEQ ID NO: 10922
  Description of Artificial Sequence: Synthetic polypeptide
  VH of XENP018365

SEQ ID NO: 18993 - protein, 5 aa, Artificial Sequence
  Description of Artificial Sequence: Synthetic peptide
  XENP018365 vhCDR1
NYWMN

SEQ ID NO: 18994 - protein, 19 aa, Artificial Sequence
  Description of Artificial Sequence: Synthetic peptide
  XENP018365 vhCDR2
EIRLKSNNYATHYAEPVKG

SEQ ID NO: 18995 - protein, 11 aa, Artificial Sequence
  Description of Artificial Sequence: Synthetic peptide
  XENP018365 vhCDR3
YYGNYGGYFDV

SEQ ID NO: 18996 - protein, 214 aa, Artificial Sequence
  Description of Artificial Sequence: Synthetic polypeptide
  XENP018365 1G6_H1_L1.22_IgG1_PVA_/S267K Light Chain
SIVMTQSPATLSVSPGERATLSCRASQSVQNDVAWYQQKPGQSPRLLINYASHRYTGVPDRFTGSGYGTEFTLTISSLQSEDFAVYFCQQDYSSPRTFGGGTKVEIKRTVAAPSVFIFPPSDEQLKSGTASVVCLLNNFYPREAKVQWKVDNALQSGNSQESVTEQDSKDSTYSLSSTLTLSKADYEKHKVYACEVTHQGLSSPVTKSFNRGEC

SEQ ID NO: 18997 - protein, 107 aa, Artificial Sequence; identical to SEQ ID NO: 13368
  Description of Artificial Sequence: Synthetic polypeptide
  VL of XENP018365

SEQ ID NO: 18998 - protein, 11 aa, Artificial Sequence
  Description of Artificial Sequence: Synthetic peptide
  XENP018365 vlCDR1
RASQSVQNDVA

SEQ ID NO: 18999 - protein, 7 aa, Artificial Sequence
  Description of Artificial Sequence: Synthetic peptide
  XENP018365 vlCDR2
YASHRYT

SEQ ID NO: 19000 - protein, 9 aa, Artificial Sequence
  Description of Artificial Sequence: Synthetic peptide
  XENP018365 vlCDR3
QQDYSSPRT

SEQ ID NO: 19001 - protein, 451 aa, Artificial Sequence; identical to SEQ ID NO: 16221
  Description of Artificial Sequence: Synthetic polypeptide
  XENP018366 1G6_H1_L1.23_IgG1_PVA_/S267K Heavy Chain

SEQ ID NO: 19002 - protein, 122 aa, Artificial Sequence; identical to SEQ ID NO: 10922
  Description of Artificial Sequence: Synthetic polypeptide
  VH of XENP018366

SEQ ID NO: 19003 - protein, 5 aa, Artificial Sequence
  Description of Artificial Sequence: Synthetic peptide
  XENP018366 vhCDR1
NYWMN

SEQ ID NO: 19004 - protein, 19 aa, Artificial Sequence
  Description of Artificial Sequence: Synthetic peptide
  XENP018366 vhCDR2
EIRLKSNNYATHYAEPVKG

SEQ ID NO: 19005 - protein, 11 aa, Artificial Sequence
  Description of Artificial Sequence: Synthetic peptide
  XENP018366 vhCDR3
YYGNYGGYFDV

SEQ ID NO: 19006 - protein, 214 aa, Artificial Sequence
  Description of Artificial Sequence: Synthetic polypeptide
  XENP018366 1G6_H1_L1.23_IgG1_PVA_/S267K Light Chain
SIVMTQSPATLSVSPGERATLSCRASQSVGNDVAWYQQKPGQSPRLLINYASHRYTGVPDRFTGSGYGTEFTLTISSLQSEDFAVYFCQQDYSSPRTFGGGTKVEIKRTVAAPSVFIFPPSDEQLKSGTASVVCLLNNFYPREAKVQWKVDNALQSGNSQESVTEQDSKDSTYSLSSTLTLSKADYEKHKVYACEVTHQGLSSPVTKSFNRGEC

SEQ ID NO: 19007 - protein, 107 aa, Artificial Sequence; identical to SEQ ID NO: 13377
  Description of Artificial Sequence: Synthetic polypeptide
  VL of XENP018366

SEQ ID NO: 19008 - protein, 11 aa, Artificial Sequence
  Description of Artificial Sequence: Synthetic peptide
  XENP018366 vlCDR1
RASQSVGNDVA

SEQ ID NO: 19009 - protein, 7 aa, Artificial Sequence
  Description of Artificial Sequence: Synthetic peptide
  XENP018366 vlCDR2
YASHRYT

SEQ ID NO: 19010 - protein, 9 aa, Artificial Sequence
  Description of Artificial Sequence: Synthetic peptide
  XENP018366 vlCDR3
QQDYSSPRT

SEQ ID NO: 19011 - protein, 451 aa, Artificial Sequence; identical to SEQ ID NO: 16221
  Description of Artificial Sequence: Synthetic polypeptide
  XENP018367 1G6_H1_L1.24_IgG1_PVA_/S267K Heavy Chain

SEQ ID NO: 19012 - protein, 122 aa, Artificial Sequence; identical to SEQ ID NO: 10922
  Description of Artificial Sequence: Synthetic polypeptide
  VH of XENP018367

SEQ ID NO: 19013 - protein, 5 aa, Artificial Sequence
  Description of Artificial Sequence: Synthetic peptide
  XENP018367 vhCDR1
NYWMN

SEQ ID NO: 19014 - protein, 19 aa, Artificial Sequence
  Description of Artificial Sequence: Synthetic peptide
  XENP018367 vhCDR2
EIRLKSNNYATHYAEPVKG

SEQ ID NO: 19015 - protein, 11 aa, Artificial Sequence
  Description of Artificial Sequence: Synthetic peptide
  XENP018367 vhCDR3
YYGNYGGYFDV

SEQ ID NO: 19016 - protein, 214 aa, Artificial Sequence
  Description of Artificial Sequence: Synthetic polypeptide
  XENP018367 1G6_H1_L1.24_IgG1_PVA_/S267K Light Chain
SIVMTQSPATLSVSPGERATLSCRASQSVVNDVAWYQQKPGQSPRLLINYASHRYTGVPDRFTGSGYGTEFTLTISSLQSEDFAVYFCQQDYSSPRTFGGGTKVEIKRTVAAPSVFIFPPSDEQLKSGTASVVCLLNNFYPREAKVQWKVDNALQSGNSQESVTEQDSKDSTYSLSSTLTLSKADYEKHKVYACEVTHQGLSSPVTKSFNRGEC

SEQ ID NO: 19017 - protein, 107 aa, Artificial Sequence; identical to SEQ ID NO: 13386
  Description of Artificial Sequence: Synthetic polypeptide
  VL of XENP018367

SEQ ID NO: 19018 - protein, 11 aa, Artificial Sequence
  Description of Artificial Sequence: Synthetic peptide
  XENP018367 vlCDR1
RASQSVVNDVA

SEQ ID NO: 19019 - protein, 7 aa, Artificial Sequence
  Description of Artificial Sequence: Synthetic peptide
  XENP018367 vlCDR2
YASHRYT

SEQ ID NO: 19020 - protein, 9 aa, Artificial Sequence
  Description of Artificial Sequence: Synthetic peptide
  XENP018367 vlCDR3
QQDYSSPRT

SEQ ID NO: 19021 - protein, 451 aa, Artificial Sequence; identical to SEQ ID NO: 16221
  Description of Artificial Sequence: Synthetic polypeptide
  XENP018368 1G6_H1_L1.25_IgG1_PVA_/S267K Heavy Chain

SEQ ID NO: 19022 - protein, 122 aa, Artificial Sequence; identical to SEQ ID NO: 10922
  Description of Artificial Sequence: Synthetic polypeptide
  VH of XENP018368

SEQ ID NO: 19023 - protein, 5 aa, Artificial Sequence
  Description of Artificial Sequence: Synthetic peptide
  XENP018368 vhCDR1
NYWMN

SEQ ID NO: 19024 - protein, 19 aa, Artificial Sequence
  Description of Artificial Sequence: Synthetic peptide
  XENP018368 vhCDR2
EIRLKSNNYATHYAEPVKG

SEQ ID NO: 19025 - protein, 11 aa, Artificial Sequence
  Description of Artificial Sequence: Synthetic peptide
  XENP018368 vhCDR3
YYGNYGGYFDV

SEQ ID NO: 19026 - protein, 214 aa, Artificial Sequence
  Description of Artificial Sequence: Synthetic polypeptide
  XENP018368 1G6_H1_L1.25_IgG1_PVA_/S267K Light Chain
SIVMTQSPATLSVSPGERATLSCRASQSVHNDVAWYQQKPGQSPRLLINYASHRYTGVPDRFTGSGYGTEFTLTISSLQSEDFAVYFCQQDYSSPRTFGGGTKVEIKRTVAAPSVFIFPPSDEQLKSGTASVVCLLNNFYPREAKVQWKVDNALQSGNSQESVTEQDSKDSTYSLSSTLTLSKADYEKHKVYACEVTHQGLSSPVTKSFNRGEC

SEQ ID NO: 19027 - protein, 107 aa, Artificial Sequence; identical to SEQ ID NO: 13395
  Description of Artificial Sequence: Synthetic polypeptide
  VL of XENP018368

SEQ ID NO: 19028 - protein, 11 aa, Artificial Sequence
  Description of Artificial Sequence: Synthetic peptide
  XENP018368 vlCDR1
RASQSVHNDVA

SEQ ID NO: 19029 - protein, 7 aa, Artificial Sequence
  Description of Artificial Sequence: Synthetic peptide
  XENP018368 vlCDR2
YASHRYT

SEQ ID NO: 19030 - protein, 9 aa, Artificial Sequence
  Description of Artificial Sequence: Synthetic peptide
  XENP018368 vlCDR3
QQDYSSPRT

SEQ ID NO: 19031 - protein, 451 aa, Artificial Sequence; identical to SEQ ID NO: 16221
  Description of Artificial Sequence: Synthetic polypeptide
  XENP018369 1G6_H1_L1.26_IgG1_PVA_/S267K Heavy Chain

SEQ ID NO: 19032 - protein, 122 aa, Artificial Sequence; identical to SEQ ID NO: 10922
  Description of Artificial Sequence: Synthetic polypeptide
  VH of XENP018369

SEQ ID NO: 19033 - protein, 5 aa, Artificial Sequence
  Description of Artificial Sequence: Synthetic peptide
  XENP018369 vhCDR1
NYWMN

SEQ ID NO: 19034 - protein, 19 aa, Artificial Sequence
  Description of Artificial Sequence: Synthetic peptide
  XENP018369 vhCDR2
EIRLKSNNYATHYAEPVKG

SEQ ID NO: 19035 - protein, 11 aa, Artificial Sequence
  Description of Artificial Sequence: Synthetic peptide
  XENP018369 vhCDR3
YYGNYGGYFDV

SEQ ID NO: 19036 - protein, 214 aa, Artificial Sequence
  Description of Artificial Sequence: Synthetic polypeptide
  XENP018369 1G6_H1_L1.26_IgG1_PVA_/S267K Light Chain
SIVMTQSPATLSVSPGERATLSCRASQSVDNDVAWYQQKPGQSPRLLINYASHRYTGVPDRFTGSGYGTEFTLTISSLQSEDFAVYFCQQDYSSPRTFGGGTKVEIKRTVAAPSVFIFPPSDEQLKSGTASVVCLLNNFYPREAKVQWKVDNALQSGNSQESVTEQDSKDSTYSLSSTLTLSKADYEKHKVYACEVTHQGLSSPVTKSFNRGEC

SEQ ID NO: 19037 - protein, 107 aa, Artificial Sequence; identical to SEQ ID NO: 13404
  Description of Artificial Sequence: Synthetic polypeptide
  VL of XENP018369

SEQ ID NO: 19038 - protein, 11 aa, Artificial Sequence
  Description of Artificial Sequence: Synthetic peptide
  XENP018369 vlCDR1
RASQSVDNDVA

SEQ ID NO: 19039 - protein, 7 aa, Artificial Sequence
  Description of Artificial Sequence: Synthetic peptide
  XENP018369 vlCDR2
YASHRYT

SEQ ID NO: 19040 - protein, 9 aa, Artificial Sequence
  Description of Artificial Sequence: Synthetic peptide
  XENP018369 vlCDR3
QQDYSSPRT

SEQ ID NO: 19041 - protein, 451 aa, Artificial Sequence; identical to SEQ ID NO: 16221
  Description of Artificial Sequence: Synthetic polypeptide
  XENP018370 1G6_H1_L1.27_IgG1_PVA_/S267K Heavy Chain

SEQ ID NO: 19042 - protein, 122 aa, Artificial Sequence; identical to SEQ ID NO: 10922
  Description of Artificial Sequence: Synthetic polypeptide
  VH of XENP018370

SEQ ID NO: 19043 - protein, 5 aa, Artificial Sequence
  Description of Artificial Sequence: Synthetic peptide
  XENP018370 vhCDR1
NYWMN

SEQ ID NO: 19044 - protein, 19 aa, Artificial Sequence
  Description of Artificial Sequence: Synthetic peptide
  XENP018370 vhCDR2
EIRLKSNNYATHYAEPVKG

SEQ ID NO: 19045 - protein, 11 aa, Artificial Sequence
  Description of Artificial Sequence: Synthetic peptide
  XENP018370 vhCDR3
YYGNYGGYFDV

SEQ ID NO: 19046 - protein, 214 aa, Artificial Sequence
  Description of Artificial Sequence: Synthetic polypeptide
  XENP018370 1G6_H1_L1.27_IgG1_PVA_/S267K Light Chain
SIVMTQSPATLSVSPGERATLSCRASQSVKNDVAWYQQKPGQSPRLLINYASHRYTGVPDRFTGSGYGTEFTLTISSLQSEDFAVYFCQQDYSSPRTFGGGTKVEIKRTVAAPSVFIFPPSDEQLKSGTASVVCLLNNFYPREAKVQWKVDNALQSGNSQESVTEQDSKDSTYSLSSTLTLSKADYEKHKVYACEVTHQGLSSPVTKSFNRGEC

SEQ ID NO: 19047 - protein, 107 aa, Artificial Sequence; identical to SEQ ID NO: 13413
  Description of Artificial Sequence: Synthetic polypeptide
  VL of XENP018370

SEQ ID NO: 19048 - protein, 11 aa, Artificial Sequence
  Description of Artificial Sequence: Synthetic peptide
  XENP018370 vlCDR1
RASQSVKNDVA

SEQ ID NO: 19049 - protein, 7 aa, Artificial Sequence
  Description of Artificial Sequence: Synthetic peptide
  XENP018370 vlCDR2
YASHRYT

SEQ ID NO: 19050 - protein, 9 aa, Artificial Sequence
  Description of Artificial Sequence: Synthetic peptide
  XENP018370 vlCDR3
QQDYSSPRT

SEQ ID NO: 19051 - protein, 451 aa, Artificial Sequence; identical to SEQ ID NO: 16221
  Description of Artificial Sequence: Synthetic polypeptide
  XENP018371 1G6_H1_L1.28_IgG1_PVA_/S267K Heavy Chain

SEQ ID NO: 19052 - protein, 122 aa, Artificial Sequence; identical to SEQ ID NO: 10922
  Description of Artificial Sequence: Synthetic polypeptide
  VH of XENP018371

SEQ ID NO: 19053 - protein, 5 aa, Artificial Sequence
  Description of Artificial Sequence: Synthetic peptide
  XENP018371 vhCDR1
NYWMN

SEQ ID NO: 19054 - protein, 19 aa, Artificial Sequence
  Description of Artificial Sequence: Synthetic peptide
  XENP018371 vhCDR2
EIRLKSNNYATHYAEPVKG

SEQ ID NO: 19055 - protein, 11 aa, Artificial Sequence
  Description of Artificial Sequence: Synthetic peptide
  XENP018371 vhCDR3
YYGNYGGYFDV

SEQ ID NO: 19056 - protein, 214 aa, Artificial Sequence
  Description of Artificial Sequence: Synthetic polypeptide
  XENP018371 1G6_H1_L1.28_IgG1_PVA_/S267K Light Chain
SIVMTQSPATLSVSPGERATLSCRASQSVYNDVAWYQQKPGQSPRLLINYASHRYTGVPDRFTGSGYGTEFTLTISSLQSEDFAVYFCQQDYSSPRTFGGGTKVEIKRTVAAPSVFIFPPSDEQLKSGTASVVCLLNNFYPREAKVQWKVDNALQSGNSQESVTEQDSKDSTYSLSSTLTLSKADYEKHKVYACEVTHQGLSSPVTKSFNRGEC

SEQ ID NO: 19057 - protein, 107 aa, Artificial Sequence; identical to SEQ ID NO: 13422
  Description of Artificial Sequence: Synthetic polypeptide
  VL of XENP018371

SEQ ID NO: 19058 - protein, 11 aa, Artificial Sequence
  Description of Artificial Sequence: Synthetic peptide
  XENP018371 vlCDR1
RASQSVYNDVA

SEQ ID NO: 19059 - protein, 7 aa, Artificial Sequence
  Description of Artificial Sequence: Synthetic peptide
  XENP018371 vlCDR2
YASHRYT

SEQ ID NO: 19060 - protein, 9 aa, Artificial Sequence
  Description of Artificial Sequence: Synthetic peptide
  XENP018371 vlCDR3
QQDYSSPRT

SEQ ID NO: 19061 - protein, 451 aa, Artificial Sequence; identical to SEQ ID NO: 16221
  Description of Artificial Sequence: Synthetic polypeptide
  XENP018372 1G6_H1_L1.29_IgG1_PVA_/S267K Heavy Chain

SEQ ID NO: 19062 - protein, 122 aa, Artificial Sequence; identical to SEQ ID NO: 10922
  Description of Artificial Sequence: Synthetic polypeptide
  VH of XENP018372

SEQ ID NO: 19063 - protein, 5 aa, Artificial Sequence
  Description of Artificial Sequence: Synthetic peptide
  XENP018372 vhCDR1
NYWMN

SEQ ID NO: 19064 - protein, 19 aa, Artificial Sequence
  Description of Artificial Sequence: Synthetic peptide
  XENP018372 vhCDR2
EIRLKSNNYATHYAEPVKG

SEQ ID NO: 19065 - protein, 11 aa, Artificial Sequence
  Description of Artificial Sequence: Synthetic peptide
  XENP018372 vhCDR3
YYGNYGGYFDV

SEQ ID NO: 19066 - protein, 214 aa, Artificial Sequence
  Description of Artificial Sequence: Synthetic polypeptide
  XENP018372 1G6_H1_L1.29_IgG1_PVA_/S267K Light Chain
SIVMTQSPATLSVSPGERATLSCRASQSVSDDVAWYQQKPGQSPRLLINYASHRYTGVPDRFTGSGYGTEFTLTISSLQSEDFAVYFCQQDYSSPRTFGGGTKVEIKRTVAAPSVFIFPPSDEQLKSGTASVVCLLNNFYPREAKVQWKVDNALQSGNSQESVTEQDSKDSTYSLSSTLTLSKADYEKHKVYACEVTHQGLSSPVTKSFNRGEC

SEQ ID NO: 19067 - protein, 107 aa, Artificial Sequence; identical to SEQ ID NO: 13431
  Description of Artificial Sequence: Synthetic polypeptide
  VL of XENP018372

SEQ ID NO: 19068 - protein, 11 aa, Artificial Sequence
  Description of Artificial Sequence: Synthetic peptide
  XENP018372 vlCDR1
RASQSVSDDVA

SEQ ID NO: 19069 - protein, 7 aa, Artificial Sequence
  Description of Artificial Sequence: Synthetic peptide
  XENP018372 vlCDR2
YASHRYT

SEQ ID NO: 19070 - protein, 9 aa, Artificial Sequence
  Description of Artificial Sequence: Synthetic peptide
  XENP018372 vlCDR3
QQDYSSPRT

SEQ ID NO: 19071 - protein, 451 aa, Artificial Sequence; identical to SEQ ID NO: 16221
  Description of Artificial Sequence: Synthetic polypeptide
  XENP018373 1G6_H1_L1.30_IgG1_PVA_/S267K Heavy Chain

SEQ ID NO: 19072 - protein, 122 aa, Artificial Sequence; identical to SEQ ID NO: 10922
  Description of Artificial Sequence: Synthetic polypeptide
  VH of XENP018373

SEQ ID NO: 19073 - protein, 5 aa, Artificial Sequence
  Description of Artificial Sequence: Synthetic peptide
  XENP018373 vhCDR1
NYWMN

SEQ ID NO: 19074 - protein, 19 aa, Artificial Sequence
  Description of Artificial Sequence: Synthetic peptide
  XENP018373 vhCDR2
EIRLKSNNYATHYAEPVKG

SEQ ID NO: 19075 - protein, 11 aa, Artificial Sequence
  Description of Artificial Sequence: Synthetic peptide
  XENP018373 vhCDR3
YYGNYGGYFDV

SEQ ID NO: 19076 - protein, 214 aa, Artificial Sequence
  Description of Artificial Sequence: Synthetic polypeptide
  XENP018373 1G6_H1_L1.30_IgG1_PVA_/S267K Light Chain
SIVMTQSPATLSVSPGERATLSCRASQSVSHDVAWYQQKPGQSPRLLINYASHRYTGVPDRFTGSGYGTEFTLTISSLQSEDFAVYFCQQDYSSPRTFGGGTKVEIKRTVAAPSVFIFPPSDEQLKSGTASVVCLLNNFYPREAKVQWKVDNALQSGNSQESVTEQDSKDSTYSLSSTLTLSKADYEKHKVYACEVTHQGLSSPVTKSFNRGEC

SEQ ID NO: 19077 - protein, 107 aa, Artificial Sequence; identical to SEQ ID NO: 13440
  Description of Artificial Sequence: Synthetic polypeptide
  VL of XENP018373

SEQ ID NO: 19078 - protein, 11 aa, Artificial Sequence
  Description of Artificial Sequence: Synthetic peptide
  XENP018373 vlCDR1
RASQSVSHDVA

SEQ ID NO: 19079 - protein, 7 aa, Artificial Sequence
  Description of Artificial Sequence: Synthetic peptide
  XENP018373 vlCDR2
YASHRYT

SEQ ID NO: 19080 - protein, 9 aa, Artificial Sequence
  Description of Artificial Sequence: Synthetic peptide
  XENP018373 vlCDR3
QQDYSSPRT

SEQ ID NO: 19081 - protein, 451 aa, Artificial Sequence; identical to SEQ ID NO: 16221
  Description of Artificial Sequence: Synthetic polypeptide
  XENP018374 1G6_H1_L1.31_IgG1_PVA_/S267K Heavy Chain

SEQ ID NO: 19082 - protein, 122 aa, Artificial Sequence; identical to SEQ ID NO: 10922
  Description of Artificial Sequence: Synthetic polypeptide
  VH of XENP018374

SEQ ID NO: 19083 - protein, 5 aa, Artificial Sequence
  Description of Artificial Sequence: Synthetic peptide
  XENP018374 vhCDR1
NYWMN

SEQ ID NO: 19084 - protein, 19 aa, Artificial Sequence
  Description of Artificial Sequence: Synthetic peptide
  XENP018374 vhCDR2
EIRLKSNNYATHYAEPVKG

SEQ ID NO: 19085 - protein, 11 aa, Artificial Sequence
  Description of Artificial Sequence: Synthetic peptide
  XENP018374 vhCDR3
YYGNYGGYFDV

SEQ ID NO: 19086 - protein, 214 aa, Artificial Sequence
  Description of Artificial Sequence: Synthetic polypeptide
  XENP018374 1G6_H1_L1.31_IgG1_PVA_/S267K Light Chain
SIVMTQSPATLSVSPGERATLSCRASQSVSEDVAWYQQKPGQSPRLLINYASHRYTGVPDRFTGSGYGTEFTLTISSLQSEDFAVYFCQQDYSSPRTFGGGTKVEIKRTVAAPSVFIFPPSDEQLKSGTASVVCLLNNFYPREAKVQWKVDNALQSGNSQESVTEQDSKDSTYSLSSTLTLSKADYEKHKVYACEVTHQGLSSPVTKSFNRGEC

SEQ ID NO: 19087 - protein, 107 aa, Artificial Sequence; identical to SEQ ID NO: 13449
  Description of Artificial Sequence: Synthetic polypeptide
  VL of XENP018374

SEQ ID NO: 19088 - protein, 11 aa, Artificial Sequence
  Description of Artificial Sequence: Synthetic peptide
  XENP018374 vlCDR1
RASQSVSEDVA

SEQ ID NO: 19089 - protein, 7 aa, Artificial Sequence
  Description of Artificial Sequence: Synthetic peptide
  XENP018374 vlCDR2
YASHRYT

SEQ ID NO: 19090 - protein, 9 aa, Artificial Sequence
  Description of Artificial Sequence: Synthetic peptide
  XENP018374 vlCDR3
QQDYSSPRT

SEQ ID NO: 19091 - protein, 451 aa, Artificial Sequence; identical to SEQ ID NO: 16221
  Description of Artificial Sequence: Synthetic polypeptide
  XENP018375 1G6_H1_L1.32_IgG1_PVA_/S267K Heavy Chain

SEQ ID NO: 19092 - protein, 122 aa, Artificial Sequence; identical to SEQ ID NO: 10922
  Description of Artificial Sequence: Synthetic polypeptide
  VH of XENP018375

SEQ ID NO: 19093 - protein, 5 aa, Artificial Sequence
  Description of Artificial Sequence: Synthetic peptide
  XENP018375 vhCDR1
NYWMN

SEQ ID NO: 19094 - protein, 19 aa, Artificial Sequence
  Description of Artificial Sequence: Synthetic peptide
  XENP018375 vhCDR2
EIRLKSNNYATHYAEPVKG

SEQ ID NO: 19095 - protein, 11 aa, Artificial Sequence
  Description of Artificial Sequence: Synthetic peptide
  XENP018375 vhCDR3
YYGNYGGYFDV

SEQ ID NO: 19096 - protein, 214 aa, Artificial Sequence
  Description of Artificial Sequence: Synthetic polypeptide
  XENP018375 1G6_H1_L1.32_IgG1_PVA_/S267K Light Chain
SIVMTQSPATLSVSPGERATLSCRASQSVSSDVAWYQQKPGQSPRLLINYASHRYTGVPDRFTGSGYGTEFTLTISSLQSEDFAVYFCQQDYSSPRTFGGGTKVEIKRTVAAPSVFIFPPSDEQLKSGTASVVCLLNNFYPREAKVQWKVDNALQSGNSQESVTEQDSKDSTYSLSSTLTLSKADYEKHKVYACEVTHQGLSSPVTKSFNRGEC

SEQ ID NO: 19097 - protein, 107 aa, Artificial Sequence; identical to SEQ ID NO: 13458
  Description of Artificial Sequence: Synthetic polypeptide
  VL of XENP018375

SEQ ID NO: 19098 - protein, 11 aa, Artificial Sequence
  Description of Artificial Sequence: Synthetic peptide
  XENP018375 vlCDR1
RASQSVSSDVA

SEQ ID NO: 19099 - protein, 7 aa, Artificial Sequence
  Description of Artificial Sequence: Synthetic peptide
  XENP018375 vlCDR2
YASHRYT

SEQ ID NO: 19100 - protein, 9 aa, Artificial Sequence
  Description of Artificial Sequence: Synthetic peptide
  XENP018375 vlCDR3
QQDYSSPRT

SEQ ID NO: 19101 - protein, 451 aa, Artificial Sequence; identical to SEQ ID NO: 16221
  Description of Artificial Sequence: Synthetic polypeptide
  XENP018376 1G6_H1_L1.33_IgG1_PVA_/S267K Heavy Chain

SEQ ID NO: 19102 - protein, 122 aa, Artificial Sequence; identical to SEQ ID NO: 10922
  Description of Artificial Sequence: Synthetic polypeptide
  VH of XENP018376

SEQ ID NO: 19103 - protein, 5 aa, Artificial Sequence
  Description of Artificial Sequence: Synthetic peptide
  XENP018376 vhCDR1
NYWMN

SEQ ID NO: 19104 - protein, 19 aa, Artificial Sequence
  Description of Artificial Sequence: Synthetic peptide
  XENP018376 vhCDR2
EIRLKSNNYATHYAEPVKG

SEQ ID NO: 19105 - protein, 11 aa, Artificial Sequence
  Description of Artificial Sequence: Synthetic peptide
  XENP018376 vhCDR3
YYGNYGGYFDV

SEQ ID NO: 19106 - protein, 214 aa, Artificial Sequence
  Description of Artificial Sequence: Synthetic polypeptide
  XENP018376 1G6_H1_L1.33_IgG1_PVA_/S267K Light Chain
SIVMTQSPATLSVSPGERATLSCRASQSVSRDVAWYQQKPGQSPRLLINYASHRYTGVPDRFTGSGYGTEFTLTISSLQSEDFAVYFCQQDYSSPRTFGGGTKVEIKRTVAAPSVFIFPPSDEQLKSGTASVVCLLNNFYPREAKVQWKVDNALQSGNSQESVTEQDSKDSTYSLSSTLTLSKADYEKHKVYACEVTHQGLSSPVTKSFNRGEC

SEQ ID NO: 19107 - protein, 107 aa, Artificial Sequence; identical to SEQ ID NO: 13467
  Description of Artificial Sequence: Synthetic polypeptide
  VL of XENP018376

SEQ ID NO: 19108 - protein, 11 aa, Artificial Sequence
  Description of Artificial Sequence: Synthetic peptide
  XENP018376 vlCDR1
RASQSVSRDVA

SEQ ID NO: 19109 - protein, 7 aa, Artificial Sequence
  Description of Artificial Sequence: Synthetic peptide
  XENP018376 vlCDR2
YASHRYT

SEQ ID NO: 19110 - protein, 9 aa, Artificial Sequence
  Description of Artificial Sequence: Synthetic peptide
  XENP018376 vlCDR3
QQDYSSPRT

SEQ ID NO: 19111 - protein, 451 aa, Artificial Sequence; identical to SEQ ID NO: 16221
  Description of Artificial Sequence: Synthetic polypeptide
  XENP018377 1G6_H1_L1.34_IgG1_PVA_/S267K Heavy Chain

SEQ ID NO: 19112 - protein, 122 aa, Artificial Sequence; identical to SEQ ID NO: 10922
  Description of Artificial Sequence: Synthetic polypeptide
  VH of XENP018377

SEQ ID NO: 19113 - protein, 5 aa, Artificial Sequence
  Description of Artificial Sequence: Synthetic peptide
  XENP018377 vhCDR1
NYWMN

SEQ ID NO: 19114 - protein, 19 aa, Artificial Sequence
  Description of Artificial Sequence: Synthetic peptide
  XENP018377 vhCDR2
EIRLKSNNYATHYAEPVKG

SEQ ID NO: 19115 - protein, 11 aa, Artificial Sequence
  Description of Artificial Sequence: Synthetic peptide
  XENP018377 vhCDR3
YYGNYGGYFDV

SEQ ID NO: 19116 - protein, 214 aa, Artificial Sequence
  Description of Artificial Sequence: Synthetic polypeptide
  XENP018377 1G6_H1_L1.34_IgG1_PVA_/S267K Light Chain
SIVMTQSPATLSVSPGERATLSCRASQSVSLDVAWYQQKPGQSPRLLINYASHRYTGVPDRFTGSGYGTEFTLTISSLQSEDFAVYFCQQDYSSPRTFGGGTKVEIKRTVAAPSVFIFPPSDEQLKSGTASVVCLLNNFYPREAKVQWKVDNALQSGNSQESVTEQDSKDSTYSLSSTLTLSKADYEKHKVYACEVTHQGLSSPVTKSFNRGEC

SEQ ID NO: 19117 - protein, 107 aa, Artificial Sequence; identical to SEQ ID NO: 13476
  Description of Artificial Sequence: Synthetic polypeptide
  VL of XENP018377

SEQ ID NO: 19118 - protein, 11 aa, Artificial Sequence
  Description of Artificial Sequence: Synthetic peptide
  XENP018377 vlCDR1
RASQSVSLDVA

SEQ ID NO: 19119 - protein, 7 aa, Artificial Sequence
  Description of Artificial Sequence: Synthetic peptide
  XENP018377 vlCDR2
YASHRYT

SEQ ID NO: 19120 - protein, 9 aa, Artificial Sequence
  Description of Artificial Sequence: Synthetic peptide
  XENP018377 vlCDR3
QQDYSSPRT

SEQ ID NO: 19121 - protein, 451 aa, Artificial Sequence; identical to SEQ ID NO: 16221
  Description of Artificial Sequence: Synthetic polypeptide
  XENP018378 1G6_H1_L1.35_IgG1_PVA_/S267K Heavy Chain

SEQ ID NO: 19122 - protein, 122 aa, Artificial Sequence; identical to SEQ ID NO: 10922
  Description of Artificial Sequence: Synthetic polypeptide
  VH of XENP018378

SEQ ID NO: 19123 - protein, 5 aa, Artificial Sequence
  Description of Artificial Sequence: Synthetic peptide
  XENP018378 vhCDR1
NYWMN

SEQ ID NO: 19124 - protein, 19 aa, Artificial Sequence
  Description of Artificial Sequence: Synthetic peptide
  XENP018378 vhCDR2
EIRLKSNNYATHYAEPVKG

SEQ ID NO: 19125 - protein, 11 aa, Artificial Sequence
  Description of Artificial Sequence: Synthetic peptide
  XENP018378 vhCDR3
YYGNYGGYFDV

SEQ ID NO: 19126 - protein, 214 aa, Artificial Sequence
  Description of Artificial Sequence: Synthetic polypeptide
  XENP018378 1G6_H1_L1.35_IgG1_PVA_/S267K Light Chain
SIVMTQSPATLSVSPGERATLSCRASQSVSTDVAWYQQKPGQSPRLLINYASHRYTGVPDRFTGSGYGTEFTLTISSLQSEDFAVYFCQQDYSSPRTFGGGTKVEIKRTVAAPSVFIFPPSDEQLKSGTASVVCLLNNFYPREAKVQWKVDNALQSGNSQESVTEQDSKDSTYSLSSTLTLSKADYEKHKVYACEVTHQGLSSPVTKSFNRGEC

SEQ ID NO: 19127 - protein, 107 aa, Artificial Sequence; identical to SEQ ID NO: 13485
  Description of Artificial Sequence: Synthetic polypeptide
  VL of XENP018378

SEQ ID NO: 19128 - protein, 11 aa, Artificial Sequence
  Description of Artificial Sequence: Synthetic peptide
  XENP018378 vlCDR1
RASQSVSTDVA

SEQ ID NO: 19129 - protein, 7 aa, Artificial Sequence
  Description of Artificial Sequence: Synthetic peptide
  XENP018378 vlCDR2
YASHRYT

SEQ ID NO: 19130 - protein, 9 aa, Artificial Sequence
  Description of Artificial Sequence: Synthetic peptide
  XENP018378 vlCDR3
QQDYSSPRT

SEQ ID NO: 19131 - protein, 451 aa, Artificial Sequence; identical to SEQ ID NO: 16221
  Description of Artificial Sequence: Synthetic polypeptide
  XENP018379 1G6_H1_L1.36_IgG1_PVA_/S267K Heavy Chain

SEQ ID NO: 19132 - protein, 122 aa, Artificial Sequence; identical to SEQ ID NO: 10922
  Description of Artificial Sequence: Synthetic polypeptide
  VH of XENP018379

SEQ ID NO: 19133 - protein, 5 aa, Artificial Sequence
  Description of Artificial Sequence: Synthetic peptide
  XENP018379 vhCDR1
NYWMN

SEQ ID NO: 19134 - protein, 19 aa, Artificial Sequence
  Description of Artificial Sequence: Synthetic peptide
  XENP018379 vhCDR2
EIRLKSNNYATHYAEPVKG

SEQ ID NO: 19135 - protein, 11 aa, Artificial Sequence
  Description of Artificial Sequence: Synthetic peptide
  XENP018379 vhCDR3
YYGNYGGYFDV

SEQ ID NO: 19136 - protein, 214 aa, Artificial Sequence
  Description of Artificial Sequence: Synthetic polypeptide
  XENP018379 1G6_H1_L1.36_IgG1_PVA_/S267K Light Chain
SIVMTQSPATLSVSPGERATLSCRASQSVSGDVAWYQQKPGQSPRLLINYASHRYTGVPDRFTGSGYGTEFTLTISSLQSEDFAVYFCQQDYSSPRTFGGGTKVEIKRTVAAPSVFIFPPSDEQLKSGTASVVCLLNNFYPREAKVQWKVDNALQSGNSQESVTEQDSKDSTYSLSSTLTLSKADYEKHKVYACEVTHQGLSSPVTKSFNRGEC

SEQ ID NO: 19137 - protein, 107 aa, Artificial Sequence; identical to SEQ ID NO: 13494
  Description of Artificial Sequence: Synthetic polypeptide
  VL of XENP018379

SEQ ID NO: 19138 - protein, 11 aa, Artificial Sequence
  Description of Artificial Sequence: Synthetic peptide
  XENP018379 vlCDR1
RASQSVSGDVA

SEQ ID NO: 19139 - protein, 7 aa, Artificial Sequence
  Description of Artificial Sequence: Synthetic peptide
  XENP018379 vlCDR2
YASHRYT

SEQ ID NO: 19140 - protein, 9 aa, Artificial Sequence
  Description of Artificial Sequence: Synthetic peptide
  XENP018379 vlCDR3
QQDYSSPRT

SEQ ID NO: 19141 - protein, 451 aa, Artificial Sequence; identical to SEQ ID NO: 16221
  Description of Artificial Sequence: Synthetic polypeptide
  XENP018380 1G6_H1_L1.37_IgG1_PVA_/S267K Heavy Chain

SEQ ID NO: 19142 - protein, 122 aa, Artificial Sequence; identical to SEQ ID NO: 10922
  Description of Artificial Sequence: Synthetic polypeptide
  VH of XENP018380

SEQ ID NO: 19143 - protein, 5 aa, Artificial Sequence
  Description of Artificial Sequence: Synthetic peptide
  XENP018380 vhCDR1
NYWMN

SEQ ID NO: 19144 - protein, 19 aa, Artificial Sequence
  Description of Artificial Sequence: Synthetic peptide
  XENP018380 vhCDR2
EIRLKSNNYATHYAEPVKG

SEQ ID NO: 19145 - protein, 11 aa, Artificial Sequence
  Description of Artificial Sequence: Synthetic peptide
  XENP018380 vhCDR3
YYGNYGGYFDV

SEQ ID NO: 19146 - protein, 214 aa, Artificial Sequence
  Description of Artificial Sequence: Synthetic polypeptide
  XENP018380 1G6_H1_L1.37_IgG1_PVA_/S267K Light Chain
SIVMTQSPATLSVSPGERATLSCRASQSVSYDVAWYQQKPGQSPRLLINYASHRYTGVPDRFTGSGYGTEFTLTISSLQSEDFAVYFCQQDYSSPRTFGGGTKVEIKRTVAAPSVFIFPPSDEQLKSGTASVVCLLNNFYPREAKVQWKVDNALQSGNSQESVTEQDSKDSTYSLSSTLTLSKADYEKHKVYACEVTHQGLSSPVTKSFNRGEC

SEQ ID NO: 19147 - protein, 107 aa, Artificial Sequence; identical to SEQ ID NO: 13503
  Description of Artificial Sequence: Synthetic polypeptide
  VL of XENP018380

SEQ ID NO: 19148 - protein, 11 aa, Artificial Sequence
  Description of Artificial Sequence: Synthetic peptide
  XENP018380 vlCDR1
RASQSVSYDVA

SEQ ID NO: 19149 - protein, 7 aa, Artificial Sequence
  Description of Artificial Sequence: Synthetic peptide
  XENP018380 vlCDR2
YASHRYT

SEQ ID NO: 19150 - protein, 9 aa, Artificial Sequence
  Description of Artificial Sequence: Synthetic peptide
  XENP018380 vlCDR3
QQDYSSPRT

SEQ ID NO: 19151 - protein, 451 aa, Artificial Sequence; identical to SEQ ID NO: 16221
  Description of Artificial Sequence: Synthetic polypeptide
  XENP018381 1G6_H1_L1.38_IgG1_PVA_/S267K Heavy Chain

SEQ ID NO: 19152 - protein, 122 aa, Artificial Sequence; identical to SEQ ID NO: 10922
  Description of Artificial Sequence: Synthetic polypeptide
  VH of XENP018381

SEQ ID NO: 19153 - protein, 5 aa, Artificial Sequence
  Description of Artificial Sequence: Synthetic peptide
  XENP018381 vhCDR1
NYWMN

SEQ ID NO: 19154 - protein, 19 aa, Artificial Sequence
  Description of Artificial Sequence: Synthetic peptide
  XENP018381 vhCDR2
EIRLKSNNYATHYAEPVKG

SEQ ID NO: 19155 - protein, 11 aa, Artificial Sequence
  Description of Artificial Sequence: Synthetic peptide
  XENP018381 vhCDR3
YYGNYGGYFDV

SEQ ID NO: 19156 - protein, 214 aa, Artificial Sequence
  Description of Artificial Sequence: Synthetic polypeptide
  XENP018381 1G6_H1_L1.38_IgG1_PVA_/S267K Light Chain
SIVMTQSPATLSVSPGERATLSCRASQSVSNNVAWYQQKPGQSPRLLINYASHRYTGVPDRFTGSGYGTEFTLTISSLQSEDFAVYFCQQDYSSPRTFGGGTKVEIKRTVAAPSVFIFPPSDEQLKSGTASVVCLLNNFYPREAKVQWKVDNALQSGNSQESVTEQDSKDSTYSLSSTLTLSKADYEKHKVYACEVTHQGLSSPVTKSFNRGEC

SEQ ID NO: 19157 - protein, 107 aa, Artificial Sequence; identical to SEQ ID NO: 13512
  Description of Artificial Sequence: Synthetic polypeptide
  VL of XENP018381

SEQ ID NO: 19158 - protein, 11 aa, Artificial Sequence
  Description of Artificial Sequence: Synthetic peptide
  XENP018381 vlCDR1
RASQSVSNNVA

SEQ ID NO: 19159 - protein, 7 aa, Artificial Sequence
  Description of Artificial Sequence: Synthetic peptide
  XENP018381 vlCDR2
YASHRYT

SEQ ID NO: 19160 - protein, 9 aa, Artificial Sequence
  Description of Artificial Sequence: Synthetic peptide
  XENP018381 vlCDR3
QQDYSSPRT

SEQ ID NO: 19161 - protein, 451 aa, Artificial Sequence; identical to SEQ ID NO: 16221
  Description of Artificial Sequence: Synthetic polypeptide
  XENP018382 1G6_H1_L1.39_IgG1_PVA_/S267K Heavy Chain

SEQ ID NO: 19162 - protein, 122 aa, Artificial Sequence; identical to SEQ ID NO: 10922
  Description of Artificial Sequence: Synthetic polypeptide
  VH of XENP018382

SEQ ID NO: 19163 - protein, 5 aa, Artificial Sequence
  Description of Artificial Sequence: Synthetic peptide
  XENP018382 vhCDR1
NYWMN

SEQ ID NO: 19164 - protein, 19 aa, Artificial Sequence
  Description of Artificial Sequence: Synthetic peptide
  XENP018382 vhCDR2
EIRLKSNNYATHYAEPVKG

SEQ ID NO: 19165 - protein, 11 aa, Artificial Sequence
  Description of Artificial Sequence: Synthetic peptide
  XENP018382 vhCDR3
YYGNYGGYFDV

SEQ ID NO: 19166 - protein, 214 aa, Artificial Sequence
  Description of Artificial Sequence: Synthetic polypeptide
  XENP018382 1G6_H1_L1.39_IgG1_PVA_/S267K Light Chain
SIVMTQSPATLSVSPGERATLSCRASQSVSNEVAWYQQKPGQSPRLLINYASHRYTGVPDRFTGSGYGTEFTLTISSLQSEDFAVYFCQQDYSSPRTFGGGTKVEIKRTVAAPSVFIFPPSDEQLKSGTASVVCLLNNFYPREAKVQWKVDNALQSGNSQESVTEQDSKDSTYSLSSTLTLSKADYEKHKVYACEVTHQGLSSPVTKSFNRGEC

SEQ ID NO: 19167 - protein, 107 aa, Artificial Sequence; identical to SEQ ID NO: 13521
  Description of Artificial Sequence: Synthetic polypeptide
  VL of XENP018382

SEQ ID NO: 19168 - protein, 11 aa, Artificial Sequence
  Description of Artificial Sequence: Synthetic peptide
  XENP018382 vlCDR1
RASQSVSNEVA

SEQ ID NO: 19169 - protein, 7 aa, Artificial Sequence
  Description of Artificial Sequence: Synthetic peptide
  XENP018382 vlCDR2
YASHRYT

SEQ ID NO: 19170 - protein, 9 aa, Artificial Sequence
  Description of Artificial Sequence: Synthetic peptide
  XENP018382 vlCDR3
QQDYSSPRT

SEQ ID NO: 19171 - protein, 451 aa, Artificial Sequence; identical to SEQ ID NO: 16221
  Description of Artificial Sequence: Synthetic polypeptide
  XENP018383 1G6_H1_L1.40_IgG1_PVA_/S267K Heavy Chain

SEQ ID NO: 19172 - protein, 122 aa, Artificial Sequence; identical to SEQ ID NO: 10922
  Description of Artificial Sequence: Synthetic polypeptide
  VH of XENP018383

SEQ ID NO: 19173 - protein, 5 aa, Artificial Sequence
  Description of Artificial Sequence: Synthetic peptide
  XENP018383 vhCDR1
NYWMN

SEQ ID NO: 19174 - protein, 19 aa, Artificial Sequence
  Description of Artificial Sequence: Synthetic peptide
  XENP018383 vhCDR2
EIRLKSNNYATHYAEPVKG

SEQ ID NO: 19175 - protein, 11 aa, Artificial Sequence
  Description of Artificial Sequence: Synthetic peptide
  XENP018383 vhCDR3
YYGNYGGYFDV

SEQ ID NO: 19176 - protein, 214 aa, Artificial Sequence
  Description of Artificial Sequence: Synthetic polypeptide
  XENP018383 1G6_H1_L1.40_IgG1_PVA_/S267K Light Chain
SIVMTQSPATLSVSPGERATLSCRASQSVSNHVAWYQQKPGQSPRLLINYASHRYTGVPDRFTGSGYGTEFTLTISSLQSEDFAVYFCQQDYSSPRTFGGGTKVEIKRTVAAPSVFIFPPSDEQLKSGTASVVCLLNNFYPREAKVQWKVDNALQSGNSQESVTEQDSKDSTYSLSSTLTLSKADYEKHKVYACEVTHQGLSSPVTKSFNRGEC

SEQ ID NO: 19177 - protein, 107 aa, Artificial Sequence; identical to SEQ ID NO: 13530
  Description of Artificial Sequence: Synthetic polypeptide
  VL of XENP018383

SEQ ID NO: 19178 - protein, 11 aa, Artificial Sequence
  Description of Artificial Sequence: Synthetic peptide
  XENP018383 vlCDR1
RASQSVSNHVA

SEQ ID NO: 19179 - protein, 7 aa, Artificial Sequence
  Description of Artificial Sequence: Synthetic peptide
  XENP018383 vlCDR2
YASHRYT

SEQ ID NO: 19180 - protein, 9 aa, Artificial Sequence
  Description of Artificial Sequence: Synthetic peptide
  XENP018383 vlCDR3
QQDYSSPRT

SEQ ID NO: 19181 - protein, 451 aa, Artificial Sequence; identical to SEQ ID NO: 16221
  Description of Artificial Sequence: Synthetic polypeptide
  XENP018384 1G6_H1_L1.41_IgG1_PVA_/S267K Heavy Chain

SEQ ID NO: 19182 - protein, 122 aa, Artificial Sequence; identical to SEQ ID NO: 10922
  Description of Artificial Sequence: Synthetic polypeptide
  VH of XENP018384

SEQ ID NO: 19183 - protein, 5 aa, Artificial Sequence
  Description of Artificial Sequence: Synthetic peptide
  XENP018384 vhCDR1
NYWMN

SEQ ID NO: 19184 - protein, 19 aa, Artificial Sequence
  Description of Artificial Sequence: Synthetic peptide
  XENP018384 vhCDR2
EIRLKSNNYATHYAEPVKG

SEQ ID NO: 19185 - protein, 11 aa, Artificial Sequence
  Description of Artificial Sequence: Synthetic peptide
  XENP018384 vhCDR3
YYGNYGGYFDV

SEQ ID NO: 19186 - protein, 214 aa, Artificial Sequence
  Description of Artificial Sequence: Synthetic polypeptide
  XENP018384 1G6_H1_L1.41_IgG1_PVA_/S267K Light Chain
SIVMTQSPATLSVSPGERATLSCRASQSVSNSVAWYQQKPGQSPRLLINYASHRYTGVPDRFTGSGYGTEFTLTISSLQSEDFAVYFCQQDYSSPRTFGGGTKVEIKRTVAAPSVFIFPPSDEQLKSGTASVVCLLNNFYPREAKVQWKVDNALQSGNSQESVTEQDSKDSTYSLSSTLTLSKADYEKHKVYACEVTHQGLSSPVTKSFNRGEC

SEQ ID NO: 19187 - protein, 107 aa, Artificial Sequence; identical to SEQ ID NO: 13539
  Description of Artificial Sequence: Synthetic polypeptide
  VL of XENP018384

SEQ ID NO: 19188 - protein, 11 aa, Artificial Sequence
  Description of Artificial Sequence: Synthetic peptide
  XENP018384 vlCDR1
RASQSVSNSVA

SEQ ID NO: 19189 - protein, 7 aa, Artificial Sequence
  Description of Artificial Sequence: Synthetic peptide
  XENP018384 vlCDR2
YASHRYT

SEQ ID NO: 19190 - protein, 9 aa, Artificial Sequence
  Description of Artificial Sequence: Synthetic peptide
  XENP018384 vlCDR3
QQDYSSPRT

SEQ ID NO: 19191 - protein, 451 aa, Artificial Sequence; identical to SEQ ID NO: 16221
  Description of Artificial Sequence: Synthetic polypeptide
  XENP018385 1G6_H1_L1.42_IgG1_PVA_/S267K Heavy Chain

SEQ ID NO: 19192 - protein, 122 aa, Artificial Sequence; identical to SEQ ID NO: 10922
  Description of Artificial Sequence: Synthetic polypeptide
  VH of XENP018385

SEQ ID NO: 19193 - protein, 5 aa, Artificial Sequence
  Description of Artificial Sequence: Synthetic peptide
  XENP018385 vhCDR1
NYWMN

SEQ ID NO: 19194 - protein, 19 aa, Artificial Sequence
  Description of Artificial Sequence: Synthetic peptide
  XENP018385 vhCDR2
EIRLKSNNYATHYAEPVKG

SEQ ID NO: 19195 - protein, 11 aa, Artificial Sequence
  Description of Artificial Sequence: Synthetic peptide
  XENP018385 vhCDR3
YYGNYGGYFDV

SEQ ID NO: 19196 - protein, 214 aa, Artificial Sequence
  Description of Artificial Sequence: Synthetic polypeptide
  XENP018385 1G6_H1_L1.42_IgG1_PVA_/S267K Light Chain
SIVMTQSPATLSVSPGERATLSCRASQSVSNRVAWYQQKPGQSPRLLINYASHRYTGVPDRFTGSGYGTEFTLTISSLQSEDFAVYFCQQDYSSPRTFGGGTKVEIKRTVAAPSVFIFPPSDEQLKSGTASVVCLLNNFYPREAKVQWKVDNALQSGNSQESVTEQDSKDSTYSLSSTLTLSKADYEKHKVYACEVTHQGLSSPVTKSFNRGEC

SEQ ID NO: 19197 - protein, 107 aa, Artificial Sequence; identical to SEQ ID NO: 13548
  Description of Artificial Sequence: Synthetic polypeptide
  VL of XENP018385

SEQ ID NO: 19198 - protein, 11 aa, Artificial Sequence
  Description of Artificial Sequence: Synthetic peptide
  XENP018385 vlCDR1
RASQSVSNRVA

SEQ ID NO: 19199 - protein, 7 aa, Artificial Sequence
  Description of Artificial Sequence: Synthetic peptide
  XENP018385 vlCDR2
YASHRYT

SEQ ID NO: 19200 - protein, 9 aa, Artificial Sequence
  Description of Artificial Sequence: Synthetic peptide
  XENP018385 vlCDR3
QQDYSSPRT

SEQ ID NO: 19201 - protein, 451 aa, Artificial Sequence; identical to SEQ ID NO: 16221
  Description of Artificial Sequence: Synthetic polypeptide
  XENP018386 1G6_H1_L1.43_IgG1_PVA_/S267K Heavy Chain

SEQ ID NO: 19202 - protein, 122 aa, Artificial Sequence; identical to SEQ ID NO: 10922
  Description of Artificial Sequence: Synthetic polypeptide
  VH of XENP018386

SEQ ID NO: 19203 - protein, 5 aa, Artificial Sequence
  Description of Artificial Sequence: Synthetic peptide
  XENP018386 vhCDR1
NYWMN

SEQ ID NO: 19204 - protein, 19 aa, Artificial Sequence
  Description of Artificial Sequence: Synthetic peptide
  XENP018386 vhCDR2
EIRLKSNNYATHYAEPVKG

SEQ ID NO: 19205 - protein, 11 aa, Artificial Sequence
  Description of Artificial Sequence: Synthetic peptide
  XENP018386 vhCDR3
YYGNYGGYFDV

SEQ ID NO: 19206 - protein, 214 aa, Artificial Sequence
  Description of Artificial Sequence: Synthetic polypeptide
  XENP018386 1G6_H1_L1.43_IgG1_PVA_/S267K Light Chain
SIVMTQSPATLSVSPGERATLSCRASQSVSNLVAWYQQKPGQSPRLLINYASHRYTGVPDRFTGSGYGTEFTLTISSLQSEDFAVYFCQQDYSSPRTFGGGTKVEIKRTVAAPSVFIFPPSDEQLKSGTASVVCLLNNFYPREAKVQWKVDNALQSGNSQESVTEQDSKDSTYSLSSTLTLSKADYEKHKVYACEVTHQGLSSPVTKSFNRGEC

SEQ ID NO: 19207 - protein, 107 aa, Artificial Sequence; identical to SEQ ID NO: 13557
  Description of Artificial Sequence: Synthetic polypeptide
  VL of XENP018386

SEQ ID NO: 19208 - protein, 11 aa, Artificial Sequence
  Description of Artificial Sequence: Synthetic peptide
  XENP018386 vlCDR1
RASQSVSNLVA

SEQ ID NO: 19209 - protein, 7 aa, Artificial Sequence
  Description of Artificial Sequence: Synthetic peptide
  XENP018386 vlCDR2
YASHRYT

SEQ ID NO: 19210 - protein, 9 aa, Artificial Sequence
  Description of Artificial Sequence: Synthetic peptide
  XENP018386 vlCDR3
QQDYSSPRT

SEQ ID NO: 19211 - protein, 451 aa, Artificial Sequence; identical to SEQ ID NO: 16221
  Description of Artificial Sequence: Synthetic polypeptide
  XENP018387 1G6_H1_L1.44_IgG1_PVA_/S267K Heavy Chain

SEQ ID NO: 19212 - protein, 122 aa, Artificial Sequence; identical to SEQ ID NO: 10922
  Description of Artificial Sequence: Synthetic polypeptide
  VH of XENP018387

SEQ ID NO: 19213 - protein, 5 aa, Artificial Sequence
  Description of Artificial Sequence: Synthetic peptide
  XENP018387 vhCDR1
NYWMN

SEQ ID NO: 19214 - protein, 19 aa, Artificial Sequence
  Description of Artificial Sequence: Synthetic peptide
  XENP018387 vhCDR2
EIRLKSNNYATHYAEPVKG

SEQ ID NO: 19215 - protein, 11 aa, Artificial Sequence
  Description of Artificial Sequence: Synthetic peptide
  XENP018387 vhCDR3
YYGNYGGYFDV

SEQ ID NO: 19216 - protein, 214 aa, Artificial Sequence
  Description of Artificial Sequence: Synthetic polypeptide
  XENP018387 1G6_H1_L1.44_IgG1_PVA_/S267K Light Chain
SIVMTQSPATLSVSPGERATLSCRASQSVSNTVAWYQQKPGQSPRLLINYASHRYTGVPDRFTGSGYGTEFTLTISSLQSEDFAVYFCQQDYSSPRTFGGGTKVEIKRTVAAPSVFIFPPSDEQLKSGTASVVCLLNNFYPREAKVQWKVDNALQSGNSQESVTEQDSKDSTYSLSSTLTLSKADYEKHKVYACEVTHQGLSSPVTKSFNRGEC

SEQ ID NO: 19217 - protein, 107 aa, Artificial Sequence; identical to SEQ ID NO: 13566
  Description of Artificial Sequence: Synthetic polypeptide
  VL of XENP018387

SEQ ID NO: 19218 - protein, 11 aa, Artificial Sequence
  Description of Artificial Sequence: Synthetic peptide
  XENP018387 vlCDR1
RASQSVSNTVA

SEQ ID NO: 19219 - protein, 7 aa, Artificial Sequence
  Description of Artificial Sequence: Synthetic peptide
  XENP018387 vlCDR2
YASHRYT

SEQ ID NO: 19220 - protein, 9 aa, Artificial Sequence
  Description of Artificial Sequence: Synthetic peptide
  XENP018387 vlCDR3
QQDYSSPRT

SEQ ID NO: 19221 - protein, 451 aa, Artificial Sequence; identical to SEQ ID NO: 16221
  Description of Artificial Sequence: Synthetic polypeptide
  XENP018388 1G6_H1_L1.45_IgG1_PVA_/S267K Heavy Chain

SEQ ID NO: 19222 - protein, 122 aa, Artificial Sequence; identical to SEQ ID NO: 10922
  Description of Artificial Sequence: Synthetic polypeptide
  VH of XENP018388

SEQ ID NO: 19223 - protein, 5 aa, Artificial Sequence
  Description of Artificial Sequence: Synthetic peptide
  XENP018388 vhCDR1
NYWMN

SEQ ID NO: 19224 - protein, 19 aa, Artificial Sequence
  Description of Artificial Sequence: Synthetic peptide
  XENP018388 vhCDR2
EIRLKSNNYATHYAEPVKG

SEQ ID NO: 19225 - protein, 11 aa, Artificial Sequence
  Description of Artificial Sequence: Synthetic peptide
  XENP018388 vhCDR3
YYGNYGGYFDV

SEQ ID NO: 19226 - protein, 214 aa, Artificial Sequence
  Description of Artificial Sequence: Synthetic polypeptide
  XENP018388 1G6_H1_L1.45_IgG1_PVA_/S267K Light Chain
SIVMTQSPATLSVSPGERATLSCRASQSVSNGVAWYQQKPGQSPRLLINYASHRYTGVPDRFTGSGYGTEFTLTISSLQSEDFAVYFCQQDYSSPRTFGGGTKVEIKRTVAAPSVFIFPPSDEQLKSGTASVVCLLNNFYPREAKVQWKVDNALQSGNSQESVTEQDSKDSTYSLSSTLTLSKADYEKHKVYACEVTHQGLSSPVTKSFNRGEC

SEQ ID NO: 19227 - protein, 107 aa, Artificial Sequence; identical to SEQ ID NO: 13575
  Description of Artificial Sequence: Synthetic polypeptide
  VL of XENP018388

SEQ ID NO: 19228 - protein, 11 aa, Artificial Sequence
  Description of Artificial Sequence: Synthetic peptide
  XENP018388 vlCDR1
RASQSVSNGVA

SEQ ID NO: 19229 - protein, 7 aa, Artificial Sequence
  Description of Artificial Sequence: Synthetic peptide
  XENP018388 vlCDR2
YASHRYT

SEQ ID NO: 19230 - protein, 9 aa, Artificial Sequence
  Description of Artificial Sequence: Synthetic peptide
  XENP018388 vlCDR3
QQDYSSPRT

SEQ ID NO: 19231 - protein, 451 aa, Artificial Sequence; identical to SEQ ID NO: 16221
  Description of Artificial Sequence: Synthetic polypeptide
  XENP018389 1G6_H1_L1.46_IgG1_PVA_/S267K Heavy Chain

SEQ ID NO: 19232 - protein, 122 aa, Artificial Sequence; identical to SEQ ID NO: 10922
  Description of Artificial Sequence: Synthetic polypeptide
  VH of XENP018389

SEQ ID NO: 19233 - protein, 5 aa, Artificial Sequence
  Description of Artificial Sequence: Synthetic peptide
  XENP018389 vhCDR1
NYWMN

SEQ ID NO: 19234 - protein, 19 aa, Artificial Sequence
  Description of Artificial Sequence: Synthetic peptide
  XENP018389 vhCDR2
EIRLKSNNYATHYAEPVKG

SEQ ID NO: 19235 - protein, 11 aa, Artificial Sequence
  Description of Artificial Sequence: Synthetic peptide
  XENP018389 vhCDR3
YYGNYGGYFDV

SEQ ID NO: 19236 - protein, 214 aa, Artificial Sequence
  Description of Artificial Sequence: Synthetic polypeptide
  XENP018389 1G6_H1_L1.46_IgG1_PVA_/S267K Light Chain
SIVMTQSPATLSVSPGERATLSCRASQSVSNYVAWYQQKPGQSPRLLINYASHRYTGVPDRFTGSGYGTEFTLTISSLQSEDFAVYFCQQDYSSPRTFGGGTKVEIKRTVAAPSVFIFPPSDEQLKSGTASVVCLLNNFYPREAKVQWKVDNALQSGNSQESVTEQDSKDSTYSLSSTLTLSKADYEKHKVYACEVTHQGLSSPVTKSFNRGEC

SEQ ID NO: 19237 - protein, 107 aa, Artificial Sequence; identical to SEQ ID NO: 13584
  Description of Artificial Sequence: Synthetic polypeptide
  VL of XENP018389

SEQ ID NO: 19238 - protein, 11 aa, Artificial Sequence
  Description of Artificial Sequence: Synthetic peptide
  XENP018389 vlCDR1
RASQSVSNYVA

SEQ ID NO: 19239 - protein, 7 aa, Artificial Sequence
  Description of Artificial Sequence: Synthetic peptide
  XENP018389 vlCDR2
YASHRYT

SEQ ID NO: 19240 - protein, 9 aa, Artificial Sequence
  Description of Artificial Sequence: Synthetic peptide
  XENP018389 vlCDR3
QQDYSSPRT

SEQ ID NO: 19241 - protein, 451 aa, Artificial Sequence; identical to SEQ ID NO: 16221
  Description of Artificial Sequence: Synthetic polypeptide
  XENP018390 1G6_H1_L1.47_IgG1_PVA_/S267K Heavy Chain

SEQ ID NO: 19242 - protein, 122 aa, Artificial Sequence; identical to SEQ ID NO: 10922
  Description of Artificial Sequence: Synthetic polypeptide
  VH of XENP018390

SEQ ID NO: 19243 - protein, 5 aa, Artificial Sequence
  Description of Artificial Sequence: Synthetic peptide
  XENP018390 vhCDR1
NYWMN

SEQ ID NO: 19244 - protein, 19 aa, Artificial Sequence
  Description of Artificial Sequence: Synthetic peptide
  XENP018390 vhCDR2
EIRLKSNNYATHYAEPVKG

SEQ ID NO: 19245 - protein, 11 aa, Artificial Sequence
  Description of Artificial Sequence: Synthetic peptide
  XENP018390 vhCDR3
YYGNYGGYFDV

SEQ ID NO: 19246 - protein, 214 aa, Artificial Sequence
  Description of Artificial Sequence: Synthetic polypeptide
  XENP018390 1G6_H1_L1.47_IgG1_PVA_/S267K Light Chain
SIVMTQSPATLSVSPGERATLSCRASQSVSNDLAWYQQKPGQSPRLLINYASHRYTGVPDRFTGSGYGTEFTLTISSLQSEDFAVYFCQQDYSSPRTFGGGTKVEIKRTVAAPSVFIFPPSDEQLKSGTASVVCLLNNFYPREAKVQWKVDNALQSGNSQESVTEQDSKDSTYSLSSTLTLSKADYEKHKVYACEVTHQGLSSPVTKSFNRGEC

SEQ ID NO: 19247 - protein, 107 aa, Artificial Sequence; identical to SEQ ID NO: 13593
  Description of Artificial Sequence: Synthetic polypeptide
  VL of XENP018390

SEQ ID NO: 19248 - protein, 11 aa, Artificial Sequence
  Description of Artificial Sequence: Synthetic peptide
  XENP018390 vlCDR1
RASQSVSNDLA

SEQ ID NO: 19249 - protein, 7 aa, Artificial Sequence
  Description of Artificial Sequence: Synthetic peptide
  XENP018390 vlCDR2
YASHRYT

SEQ ID NO: 19250 - protein, 9 aa, Artificial Sequence
  Description of Artificial Sequence: Synthetic peptide
  XENP018390 vlCDR3
QQDYSSPRT

SEQ ID NO: 19251 - protein, 451 aa, Artificial Sequence; identical to SEQ ID NO: 16221
  Description of Artificial Sequence: Synthetic polypeptide
  XENP018391 1G6_H1_L1.48_IgG1_PVA_/S267K Heavy Chain

SEQ ID NO: 19252 - protein, 122 aa, Artificial Sequence; identical to SEQ ID NO: 10922
  Description of Artificial Sequence: Synthetic polypeptide
  VH of XENP018391

SEQ ID NO: 19253 - protein, 5 aa, Artificial Sequence
  Description of Artificial Sequence: Synthetic peptide
  XENP018391 vhCDR1
NYWMN

SEQ ID NO: 19254 - protein, 19 aa, Artificial Sequence
  Description of Artificial Sequence: Synthetic peptide
  XENP018391 vhCDR2
EIRLKSNNYATHYAEPVKG

SEQ ID NO: 19255 - protein, 11 aa, Artificial Sequence
  Description of Artificial Sequence: Synthetic peptide
  XENP018391 vhCDR3
YYGNYGGYFDV

SEQ ID NO: 19256 - protein, 214 aa, Artificial Sequence
  Description of Artificial Sequence: Synthetic polypeptide
  XENP018391 1G6_H1_L1.48_IgG1_PVA_/S267K Light Chain
SIVMTQSPATLSVSPGERATLSCRASQSVSNDVSWYQQKPGQSPRLLINYASHRYTGVPDRFTGSGYGTEFTLTISSLQSEDFAVYFCQQDYSSPRTFGGGTKVEIKRTVAAPSVFIFPPSDEQLKSGTASVVCLLNNFYPREAKVQWKVDNALQSGNSQESVTEQDSKDSTYSLSSTLTLSKADYEKHKVYACEVTHQGLSSPVTKSFNRGEC

SEQ ID NO: 19257 - protein, 107 aa, Artificial Sequence; identical to SEQ ID NO: 13602
  Description of Artificial Sequence: Synthetic polypeptide
  VL of XENP018391

SEQ ID NO: 19258 - protein, 11 aa, Artificial Sequence
  Description of Artificial Sequence: Synthetic peptide
  XENP018391 vlCDR1
RASQSVSNDVS

SEQ ID NO: 19259 - protein, 7 aa, Artificial Sequence
  Description of Artificial Sequence: Synthetic peptide
  XENP018391 vlCDR2
YASHRYT

SEQ ID NO: 19260 - protein, 9 aa, Artificial Sequence
  Description of Artificial Sequence: Synthetic peptide
  XENP018391 vlCDR3
QQDYSSPRT

SEQ ID NO: 19261 - protein, 451 aa, Artificial Sequence; identical to SEQ ID NO: 16221
  Description of Artificial Sequence: Synthetic polypeptide
  XENP018392 1G6_H1_L1.49_IgG1_PVA_/S267K Heavy Chain

SEQ ID NO: 19262 - protein, 122 aa, Artificial Sequence; identical to SEQ ID NO: 10922
  Description of Artificial Sequence: Synthetic polypeptide
  VH of XENP018392

SEQ ID NO: 19263 - protein, 5 aa, Artificial Sequence
  Description of Artificial Sequence: Synthetic peptide
  XENP018392 vhCDR1
NYWMN

SEQ ID NO: 19264 - protein, 19 aa, Artificial Sequence
  Description of Artificial Sequence: Synthetic peptide
  XENP018392 vhCDR2
EIRLKSNNYATHYAEPVKG

SEQ ID NO: 19265 - protein, 11 aa, Artificial Sequence
  Description of Artificial Sequence: Synthetic peptide
  XENP018392 vhCDR3
YYGNYGGYFDV

SEQ ID NO: 19266 - protein, 214 aa, Artificial Sequence
  Description of Artificial Sequence: Synthetic polypeptide
  XENP018392 1G6_H1_L1.49_IgG1_PVA_/S267K Light Chain
SIVMTQSPATLSVSPGERATLSCRASQSVSNDVTWYQQKPGQSPRLLINYASHRYTGVPDRFTGSGYGTEFTLTISSLQSEDFAVYFCQQDYSSPRTFGGGTKVEIKRTVAAPSVFIFPPSDEQLKSGTASVVCLLNNFYPREAKVQWKVDNALQSGNSQESVTEQDSKDSTYSLSSTLTLSKADYEKHKVYACEVTHQGLSSPVTKSFNRGEC

SEQ ID NO: 19267 - protein, 107 aa, Artificial Sequence; identical to SEQ ID NO: 13611
  Description of Artificial Sequence: Synthetic polypeptide
  VL of XENP018392

SEQ ID NO: 19268 - protein, 11 aa, Artificial Sequence
  Description of Artificial Sequence: Synthetic peptide
  XENP018392 vlCDR1
RASQSVSNDVT

SEQ ID NO: 19269 - protein, 7 aa, Artificial Sequence
  Description of Artificial Sequence: Synthetic peptide
  XENP018392 vlCDR2
YASHRYT

SEQ ID NO: 19270 - protein, 9 aa, Artificial Sequence
  Description of Artificial Sequence: Synthetic peptide
  XENP018392 vlCDR3
QQDYSSPRT

SEQ ID NO: 19271 - protein, 451 aa, Artificial Sequence; identical to SEQ ID NO: 16221
  Description of Artificial Sequence: Synthetic polypeptide
  XENP018393 1G6_H1_L1.50_IgG1_PVA_/S267K Heavy Chain

SEQ ID NO: 19272 - protein, 122 aa, Artificial Sequence; identical to SEQ ID NO: 10922
  Description of Artificial Sequence: Synthetic polypeptide
  VH of XENP018393

SEQ ID NO: 19273 - protein, 5 aa, Artificial Sequence
  Description of Artificial Sequence: Synthetic peptide
  XENP018393 vhCDR1
NYWMN

SEQ ID NO: 19274 - protein, 19 aa, Artificial Sequence
  Description of Artificial Sequence: Synthetic peptide
  XENP018393 vhCDR2
EIRLKSNNYATHYAEPVKG

SEQ ID NO: 19275 - protein, 11 aa, Artificial Sequence
  Description of Artificial Sequence: Synthetic peptide
  XENP018393 vhCDR3
YYGNYGGYFDV

SEQ ID NO: 19276 - protein, 214 aa, Artificial Sequence
  Description of Artificial Sequence: Synthetic polypeptide
  XENP018393 1G6_H1_L1.50_IgG1_PVA_/S267K Light Chain
SIVMTQSPATLSVSPGERATLSCRASQSVSNDVAWYQQKPGQAPRLLINYASHRYTGVPDRFTGSGYGTEFTLTISSLQSEDFAVYFCQQDYSSPRTFGGGTKVEIKRTVAAPSVFIFPPSDEQLKSGTASVVCLLNNFYPREAKVQWKVDNALQSGNSQESVTEQDSKDSTYSLSSTLTLSKADYEKHKVYACEVTHQGLSSPVTKSFNRGEC

SEQ ID NO: 19277 - protein, 107 aa, Artificial Sequence; identical to SEQ ID NO: 13620
  Description of Artificial Sequence: Synthetic polypeptide
  VL of XENP018393

SEQ ID NO: 19278 - protein, 11 aa, Artificial Sequence
  Description of Artificial Sequence: Synthetic peptide
  XENP018393 vlCDR1
RASQSVSNDVA

SEQ ID NO: 19279 - protein, 7 aa, Artificial Sequence
  Description of Artificial Sequence: Synthetic peptide
  XENP018393 vlCDR2
YASHRYT

SEQ ID NO: 19280 - protein, 9 aa, Artificial Sequence
  Description of Artificial Sequence: Synthetic peptide
  XENP018393 vlCDR3
QQDYSSPRT

SEQ ID NO: 19281 - protein, 451 aa, Artificial Sequence; identical to SEQ ID NO: 16221
  Description of Artificial Sequence: Synthetic polypeptide
  XENP018394 1G6_H1_L1.51_IgG1_PVA_/S267K Heavy Chain

SEQ ID NO: 19282 - protein, 122 aa, Artificial Sequence; identical to SEQ ID NO: 10922
  Description of Artificial Sequence: Synthetic polypeptide
  VH of XENP018394

SEQ ID NO: 19283 - protein, 5 aa, Artificial Sequence
  Description of Artificial Sequence: Synthetic peptide
  XENP018394 vhCDR1
NYWMN

SEQ ID NO: 19284 - protein, 19 aa, Artificial Sequence
  Description of Artificial Sequence: Synthetic peptide
  XENP018394 vhCDR2
EIRLKSNNYATHYAEPVKG

SEQ ID NO: 19285 - protein, 11 aa, Artificial Sequence
  Description of Artificial Sequence: Synthetic peptide
  XENP018394 vhCDR3
YYGNYGGYFDV

SEQ ID NO: 19286 - protein, 214 aa, Artificial Sequence
  Description of Artificial Sequence: Synthetic polypeptide
  XENP018394 1G6_H1_L1.51_IgG1_PVA_/S267K Light Chain
SIVMTQSPATLSVSPGERATLSCRASQSVSNDVAWYQQKPGQSPKLLINYASHRYTGVPDRFTGSGYGTEFTLTISSLQSEDFAVYFCQQDYSSPRTFGGGTKVEIKRTVAAPSVFIFPPSDEQLKSGTASVVCLLNNFYPREAKVQWKVDNALQSGNSQESVTEQDSKDSTYSLSSTLTLSKADYEKHKVYACEVTHQGLSSPVTKSFNRGEC

SEQ ID NO: 19287 - protein, 107 aa, Artificial Sequence; identical to SEQ ID NO: 13629
  Description of Artificial Sequence: Synthetic polypeptide
  VL of XENP018394

SEQ ID NO: 19288 - protein, 11 aa, Artificial Sequence
  Description of Artificial Sequence: Synthetic peptide
  XENP018394 vlCDR1
RASQSVSNDVA

SEQ ID NO: 19289 - protein, 7 aa, Artificial Sequence
  Description of Artificial Sequence: Synthetic peptide
  XENP018394 vlCDR2
YASHRYT

SEQ ID NO: 19290 - protein, 9 aa, Artificial Sequence
  Description of Artificial Sequence: Synthetic peptide
  XENP018394 vlCDR3
QQDYSSPRT

SEQ ID NO: 19291 - protein, 451 aa, Artificial Sequence; identical to SEQ ID NO: 16221
  Description of Artificial Sequence: Synthetic polypeptide
  XENP018395 1G6_H1_L1.52_IgG1_PVA_/S267K Heavy Chain

SEQ ID NO: 19292 - protein, 122 aa, Artificial Sequence; identical to SEQ ID NO: 10922
  Description of Artificial Sequence: Synthetic polypeptide
  VH of XENP018395

SEQ ID NO: 19293 - protein, 5 aa, Artificial Sequence
  Description of Artificial Sequence: Synthetic peptide
  XENP018395 vhCDR1
NYWMN

SEQ ID NO: 19294 - protein, 19 aa, Artificial Sequence
  Description of Artificial Sequence: Synthetic peptide
  XENP018395 vhCDR2
EIRLKSNNYATHYAEPVKG

SEQ ID NO: 19295 - protein, 11 aa, Artificial Sequence
  Description of Artificial Sequence: Synthetic peptide
  XENP018395 vhCDR3
YYGNYGGYFDV

SEQ ID NO: 19296 - protein, 214 aa, Artificial Sequence
  Description of Artificial Sequence: Synthetic polypeptide
  XENP018395 1G6_H1_L1.52_IgG1_PVA_/S267K Light Chain
SIVMTQSPATLSVSPGERATLSCRASQSVSNDVAWYQQKPGQSPQLLINYASHRYTGVPDRFTGSGYGTEFTLTISSLQSEDFAVYFCQQDYSSPRTFGGGTKVEIKRTVAAPSVFIFPPSDEQLKSGTASVVCLLNNFYPREAKVQWKVDNALQSGNSQESVTEQDSKDSTYSLSSTLTLSKADYEKHKVYACEVTHQGLSSPVTKSFNRGEC

SEQ ID NO: 19297 - protein, 107 aa, Artificial Sequence; identical to SEQ ID NO: 13638
  Description of Artificial Sequence: Synthetic polypeptide
  VL of XENP018395

SEQ ID NO: 19298 - protein, 11 aa, Artificial Sequence
  Description of Artificial Sequence: Synthetic peptide
  XENP018395 vlCDR1
RASQSVSNDVA

SEQ ID NO: 19299 - protein, 7 aa, Artificial Sequence
  Description of Artificial Sequence: Synthetic peptide
  XENP018395 vlCDR2
YASHRYT

SEQ ID NO: 19300 - protein, 9 aa, Artificial Sequence
  Description of Artificial Sequence: Synthetic peptide
  XENP018395 vlCDR3
QQDYSSPRT

SEQ ID NO: 19301 - protein, 451 aa, Artificial Sequence; identical to SEQ ID NO: 16221
  Description of Artificial Sequence: Synthetic polypeptide
  XENP018396 1G6_H1_L1.53_IgG1_PVA_/S267K Heavy Chain

SEQ ID NO: 19302 - protein, 122 aa, Artificial Sequence; identical to SEQ ID NO: 10922
  Description of Artificial Sequence: Synthetic polypeptide
  VH of XENP018396

SEQ ID NO: 19303 - protein, 5 aa, Artificial Sequence
  Description of Artificial Sequence: Synthetic peptide
  XENP018396 vhCDR1
NYWMN

SEQ ID NO: 19304 - protein, 19 aa, Artificial Sequence
  Description of Artificial Sequence: Synthetic peptide
  XENP018396 vhCDR2
EIRLKSNNYATHYAEPVKG

SEQ ID NO: 19305 - protein, 11 aa, Artificial Sequence
  Description of Artificial Sequence: Synthetic peptide
  XENP018396 vhCDR3
YYGNYGGYFDV

SEQ ID NO: 19306 - protein, 214 aa, Artificial Sequence
  Description of Artificial Sequence: Synthetic polypeptide
  XENP018396 1G6_H1_L1.53_IgG1_PVA_/S267K Light Chain
SIVMTQSPATLSVSPGERATLSCRASQSVSNDVAWYQQKPGQSPILLINYASHRYTGVPDRFTGSGYGTEFTLTISSLQSEDFAVYFCQQDYSSPRTFGGGTKVEIKRTVAAPSVFIFPPSDEQLKSGTASVVCLLNNFYPREAKVQWKVDNALQSGNSQESVTEQDSKDSTYSLSSTLTLSKADYEKHKVYACEVTHQGLSSPVTKSFNRGEC

SEQ ID NO: 19307 - protein, 107 aa, Artificial Sequence; identical to SEQ ID NO: 13647
  Description of Artificial Sequence: Synthetic polypeptide
  VL of XENP018396

SEQ ID NO: 19308 - protein, 11 aa, Artificial Sequence
  Description of Artificial Sequence: Synthetic peptide
  XENP018396 vlCDR1
RASQSVSNDVA

SEQ ID NO: 19309 - protein, 7 aa, Artificial Sequence
  Description of Artificial Sequence: Synthetic peptide
  XENP018396 vlCDR2
YASHRYT

SEQ ID NO: 19310 - protein, 9 aa, Artificial Sequence
  Description of Artificial Sequence: Synthetic peptide
  XENP018396 vlCDR3
QQDYSSPRT

SEQ ID NO: 19311 - protein, 451 aa, Artificial Sequence; identical to SEQ ID NO: 16221
  Description of Artificial Sequence: Synthetic polypeptide
  XENP018401 1G6_H1_L1.54_IgG1_PVA_/S267K Heavy Chain

SEQ ID NO: 19312 - protein, 122 aa, Artificial Sequence; identical to SEQ ID NO: 10922
  Description of Artificial Sequence: Synthetic polypeptide
  VH of XENP018401

SEQ ID NO: 19313 - protein, 5 aa, Artificial Sequence
  Description of Artificial Sequence: Synthetic peptide
  XENP018401 vhCDR1
NYWMN

SEQ ID NO: 19314 - protein, 19 aa, Artificial Sequence
  Description of Artificial Sequence: Synthetic peptide
  XENP018401 vhCDR2
EIRLKSNNYATHYAEPVKG

SEQ ID NO: 19315 - protein, 11 aa, Artificial Sequence
  Description of Artificial Sequence: Synthetic peptide
  XENP018401 vhCDR3
YYGNYGGYFDV

SEQ ID NO: 19316 - protein, 214 aa, Artificial Sequence
  Description of Artificial Sequence: Synthetic polypeptide
  XENP018401 1G6_H1_L1.54_IgG1_PVA_/S267K Light Chain
SIVMTQSPATLSVSPGERATLSCRASQSVSNDVAWYQQKPGQSPRLLIYYASHRYTGVPDRFTGSGYGTEFTLTISSLQSEDFAVYFCQQDYSSPRTFGGGTKVEIKRTVAAPSVFIFPPSDEQLKSGTASVVCLLNNFYPREAKVQWKVDNALQSGNSQESVTEQDSKDSTYSLSSTLTLSKADYEKHKVYACEVTHQGLSSPVTKSFNRGEC

SEQ ID NO: 19317 - protein, 107 aa, Artificial Sequence; identical to SEQ ID NO: 13656
  Description of Artificial Sequence: Synthetic polypeptide
  VL of XENP018401

SEQ ID NO: 19318 - protein, 11 aa, Artificial Sequence
  Description of Artificial Sequence: Synthetic peptide
  XENP018401 vlCDR1
RASQSVSNDVA

SEQ ID NO: 19319 - protein, 7 aa, Artificial Sequence
  Description of Artificial Sequence: Synthetic peptide
  XENP018401 vlCDR2
YASHRYT

SEQ ID NO: 19320 - protein, 9 aa, Artificial Sequence
  Description of Artificial Sequence: Synthetic peptide
  XENP018401 vlCDR3
QQDYSSPRT

SEQ ID NO: 19321 - protein, 451 aa, Artificial Sequence; identical to SEQ ID NO: 16221
  Description of Artificial Sequence: Synthetic polypeptide
  XENP018402 1G6_H1_L1.55_IgG1_PVA_/S267K Heavy Chain

SEQ ID NO: 19322 - protein, 122 aa, Artificial Sequence; identical to SEQ ID NO: 10922
  Description of Artificial Sequence: Synthetic polypeptide
  VH of XENP018402

SEQ ID NO: 19323 - protein, 5 aa, Artificial Sequence
  Description of Artificial Sequence: Synthetic peptide
  XENP018402 vhCDR1
NYWMN

SEQ ID NO: 19324 - protein, 19 aa, Artificial Sequence
  Description of Artificial Sequence: Synthetic peptide
  XENP018402 vhCDR2
EIRLKSNNYATHYAEPVKG

SEQ ID NO: 19325 - protein, 11 aa, Artificial Sequence
  Description of Artificial Sequence: Synthetic peptide
  XENP018402 vhCDR3
YYGNYGGYFDV

SEQ ID NO: 19326 - protein, 214 aa, Artificial Sequence
  Description of Artificial Sequence: Synthetic polypeptide
  XENP018402 1G6_H1_L1.55_IgG1_PVA_/S267K Light Chain
SIVMTQSPATLSVSPGERATLSCRASQSVSNDVAWYQQKPGQSPRLLINFASHRYTGVPDRFTGSGYGTEFTLTISSLQSEDFAVYFCQQDYSSPRTFGGGTKVEIKRTVAAPSVFIFPPSDEQLKSGTASVVCLLNNFYPREAKVQWKVDNALQSGNSQESVTEQDSKDSTYSLSSTLTLSKADYEKHKVYACEVTHQGLSSPVTKSFNRGEC

SEQ ID NO: 19327 - protein, 107 aa, Artificial Sequence; identical to SEQ ID NO: 13665
  Description of Artificial Sequence: Synthetic polypeptide
  VL of XENP018402

SEQ ID NO: 19328 - protein, 11 aa, Artificial Sequence
  Description of Artificial Sequence: Synthetic peptide
  XENP018402 vlCDR1
RASQSVSNDVA

SEQ ID NO: 19329 - protein, 7 aa, Artificial Sequence
  Description of Artificial Sequence: Synthetic peptide
  XENP018402 vlCDR2
FASHRYT

SEQ ID NO: 19330 - protein, 9 aa, Artificial Sequence
  Description of Artificial Sequence: Synthetic peptide
  XENP018402 vlCDR3
QQDYSSPRT

SEQ ID NO: 19331 - protein, 451 aa, Artificial Sequence; identical to SEQ ID NO: 16221
  Description of Artificial Sequence: Synthetic polypeptide
  XENP018403 1G6_H1_L1.56_IgG1_PVA_/S267K Heavy Chain

SEQ ID NO: 19332 - protein, 122 aa, Artificial Sequence; identical to SEQ ID NO: 10922
  Description of Artificial Sequence: Synthetic polypeptide
  VH of XENP018403

SEQ ID NO: 19333 - protein, 5 aa, Artificial Sequence
  Description of Artificial Sequence: Synthetic peptide
  XENP018403 vhCDR1
NYWMN

SEQ ID NO: 19334 - protein, 19 aa, Artificial Sequence
  Description of Artificial Sequence: Synthetic peptide
  XENP018403 vhCDR2
EIRLKSNNYATHYAEPVKG

SEQ ID NO: 19335 - protein, 11 aa, Artificial Sequence
  Description of Artificial Sequence: Synthetic peptide
  XENP018403 vhCDR3
YYGNYGGYFDV

SEQ ID NO: 19336 - protein, 214 aa, Artificial Sequence
  Description of Artificial Sequence: Synthetic polypeptide
  XENP018403 1G6_H1_L1.56_IgG1_PVA_/S267K Light Chain
SIVMTQSPATLSVSPGERATLSCRASQSVSNDVAWYQQKPGQSPRLLINHASHRYTGVPDRFTGSGYGTEFTLTISSLQSEDFAVYFCQQDYSSPRTFGGGTKVEIKRTVAAPSVFIFPPSDEQLKSGTASVVCLLNNFYPREAKVQWKVDNALQSGNSQESVTEQDSKDSTYSLSSTLTLSKADYEKHKVYACEVTHQGLSSPVTKSFNRGEC

SEQ ID NO: 19337 - protein, 107 aa, Artificial Sequence; identical to SEQ ID NO: 13674
  Description of Artificial Sequence: Synthetic polypeptide
  VL of XENP018403

SEQ ID NO: 19338 - protein, 11 aa, Artificial Sequence
  Description of Artificial Sequence: Synthetic peptide
  XENP018403 vlCDR1
RASQSVSNDVA

SEQ ID NO: 19339 - protein, 7 aa, Artificial Sequence
  Description of Artificial Sequence: Synthetic peptide
  XENP018403 vlCDR2
HASHRYT

SEQ ID NO: 19340 - protein, 9 aa, Artificial Sequence
  Description of Artificial Sequence: Synthetic peptide
  XENP018403 vlCDR3
QQDYSSPRT

SEQ ID NO: 19341 - protein, 451 aa, Artificial Sequence; identical to SEQ ID NO: 16221
  Description of Artificial Sequence: Synthetic polypeptide
  XENP018404 1G6_H1_L1.57_IgG1_PVA_/S267K Heavy Chain

SEQ ID NO: 19342 - protein, 122 aa, Artificial Sequence; identical to SEQ ID NO: 10922
  Description of Artificial Sequence: Synthetic polypeptide
  VH of XENP018404

SEQ ID NO: 19343 - protein, 5 aa, Artificial Sequence
  Description of Artificial Sequence: Synthetic peptide
  XENP018404 vhCDR1
NYWMN

SEQ ID NO: 19344 - protein, 19 aa, Artificial Sequence
  Description of Artificial Sequence: Synthetic peptide
  XENP018404 vhCDR2
EIRLKSNNYATHYAEPVKG

SEQ ID NO: 19345 - protein, 11 aa, Artificial Sequence
  Description of Artificial Sequence: Synthetic peptide
  XENP018404 vhCDR3
YYGNYGGYFDV

SEQ ID NO: 19346 - protein, 214 aa, Artificial Sequence
  Description of Artificial Sequence: Synthetic polypeptide
  XENP018404 1G6_H1_L1.57_IgG1_PVA_/S267K Light Chain
SIVMTQSPATLSVSPGERATLSCRASQSVSNDVAWYQQKPGQSPRLLINLASHRYTGVPDRFTGSGYGTEFTLTISSLQSEDFAVYFCQQDYSSPRTFGGGTKVEIKRTVAAPSVFIFPPSDEQLKSGTASVVCLLNNFYPREAKVQWKVDNALQSGNSQESVTEQDSKDSTYSLSSTLTLSKADYEKHKVYACEVTHQGLSSPVTKSFNRGEC

SEQ ID NO: 19347 - protein, 107 aa, Artificial Sequence; identical to SEQ ID NO: 13683
  Description of Artificial Sequence: Synthetic polypeptide
  VL of XENP018404

SEQ ID NO: 19348 - protein, 11 aa, Artificial Sequence
  Description of Artificial Sequence: Synthetic peptide
  XENP018404 vlCDR1
RASQSVSNDVA

SEQ ID NO: 19349 - protein, 7 aa, Artificial Sequence
  Description of Artificial Sequence: Synthetic peptide
  XENP018404 vlCDR2
LASHRYT

SEQ ID NO: 19350 - protein, 9 aa, Artificial Sequence
  Description of Artificial Sequence: Synthetic peptide
  XENP018404 vlCDR3
QQDYSSPRT

SEQ ID NO: 19351 - protein, 451 aa, Artificial Sequence; identical to SEQ ID NO: 16221
  Description of Artificial Sequence: Synthetic polypeptide
  XENP018405 1G6_H1_L1.58_IgG1_PVA_/S267K Heavy Chain

SEQ ID NO: 19352 - protein, 122 aa, Artificial Sequence; identical to SEQ ID NO: 10922
  Description of Artificial Sequence: Synthetic polypeptide
  VH of XENP018405

SEQ ID NO: 19353 - protein, 5 aa, Artificial Sequence
  Description of Artificial Sequence: Synthetic peptide
  XENP018405 vhCDR1
NYWMN

SEQ ID NO: 19354 - protein, 19 aa, Artificial Sequence
  Description of Artificial Sequence: Synthetic peptide
  XENP018405 vhCDR2
EIRLKSNNYATHYAEPVKG

SEQ ID NO: 19355 - protein, 11 aa, Artificial Sequence
  Description of Artificial Sequence: Synthetic peptide
  XENP018405 vhCDR3
YYGNYGGYFDV

SEQ ID NO: 19356 - protein, 214 aa, Artificial Sequence
  Description of Artificial Sequence: Synthetic polypeptide
  XENP018405 1G6_H1_L1.58_IgG1_PVA_/S267K Light Chain
SIVMTQSPATLSVSPGERATLSCRASQSVSNDVAWYQQKPGQSPRLLINWASHRYTGVPDRFTGSGYGTEFTLTISSLQSEDFAVYFCQQDYSSPRTFGGGTKVEIKRTVAAPSVFIFPPSDEQLKSGTASVVCLLNNFYPREAKVQWKVDNALQSGNSQESVTEQDSKDSTYSLSSTLTLSKADYEKHKVYACEVTHQGLSSPVTKSFNRGEC

SEQ ID NO: 19357 - protein, 107 aa, Artificial Sequence; identical to SEQ ID NO: 13692
  Description of Artificial Sequence: Synthetic polypeptide
  VL of XENP018405

SEQ ID NO: 19358 - protein, 11 aa, Artificial Sequence
  Description of Artificial Sequence: Synthetic peptide
  XENP018405 vlCDR1
RASQSVSNDVA

SEQ ID NO: 19359 - protein, 7 aa, Artificial Sequence
  Description of Artificial Sequence: Synthetic peptide
  XENP018405 vlCDR2
WASHRYT

SEQ ID NO: 19360 - protein, 9 aa, Artificial Sequence
  Description of Artificial Sequence: Synthetic peptide
  XENP018405 vlCDR3
QQDYSSPRT

SEQ ID NO: 19361 - protein, 451 aa, Artificial Sequence; identical to SEQ ID NO: 16221
  Description of Artificial Sequence: Synthetic polypeptide
  XENP018406 1G6_H1_L1.59_IgG1_PVA_/S267K Heavy Chain

SEQ ID NO: 19362 - protein, 122 aa, Artificial Sequence; identical to SEQ ID NO: 10922
  Description of Artificial Sequence: Synthetic polypeptide
  VH of XENP018406

SEQ ID NO: 19363 - protein, 5 aa, Artificial Sequence
  Description of Artificial Sequence: Synthetic peptide
  XENP018406 vhCDR1
NYWMN

SEQ ID NO: 19364 - protein, 19 aa, Artificial Sequence
  Description of Artificial Sequence: Synthetic peptide
  XENP018406 vhCDR2
EIRLKSNNYATHYAEPVKG

SEQ ID NO: 19365 - protein, 11 aa, Artificial Sequence
  Description of Artificial Sequence: Synthetic peptide
  XENP018406 vhCDR3
YYGNYGGYFDV

SEQ ID NO: 19366 - protein, 214 aa, Artificial Sequence
  Description of Artificial Sequence: Synthetic polypeptide
  XENP018406 1G6_H1_L1.59_IgG1_PVA_/S267K Light Chain
SIVMTQSPATLSVSPGERATLSCRASQSVSNDVAWYQQKPGQSPRLLINVASHRYTGVPDRFTGSGYGTEFTLTISSLQSEDFAVYFCQQDYSSPRTFGGGTKVEIKRTVAAPSVFIFPPSDEQLKSGTASVVCLLNNFYPREAKVQWKVDNALQSGNSQESVTEQDSKDSTYSLSSTLTLSKADYEKHKVYACEVTHQGLSSPVTKSFNRGEC

SEQ ID NO: 19367 - protein, 107 aa, Artificial Sequence; identical to SEQ ID NO: 13701
  Description of Artificial Sequence: Synthetic polypeptide
  VL of XENP018406

SEQ ID NO: 19368 - protein, 11 aa, Artificial Sequence
  Description of Artificial Sequence: Synthetic peptide
  XENP018406 vlCDR1
RASQSVSNDVA

SEQ ID NO: 19369 - protein, 7 aa, Artificial Sequence
  Description of Artificial Sequence: Synthetic peptide
  XENP018406 vlCDR2
VASHRYT

SEQ ID NO: 19370 - protein, 9 aa, Artificial Sequence
  Description of Artificial Sequence: Synthetic peptide
  XENP018406 vlCDR3
QQDYSSPRT

SEQ ID NO: 19371 - protein, 451 aa, Artificial Sequence; identical to SEQ ID NO: 16221
  Description of Artificial Sequence: Synthetic polypeptide
  XENP018407 1G6_H1_L1.60_IgG1_PVA_/S267K Heavy Chain

SEQ ID NO: 19372 - protein, 122 aa, Artificial Sequence; identical to SEQ ID NO: 10922
  Description of Artificial Sequence: Synthetic polypeptide
  VH of XENP018407

SEQ ID NO: 19373 - protein, 5 aa, Artificial Sequence
  Description of Artificial Sequence: Synthetic peptide
  XENP018407 vhCDR1
NYWMN

SEQ ID NO: 19374 - protein, 19 aa, Artificial Sequence
  Description of Artificial Sequence: Synthetic peptide
  XENP018407 vhCDR2
EIRLKSNNYATHYAEPVKG

SEQ ID NO: 19375 - protein, 11 aa, Artificial Sequence
  Description of Artificial Sequence: Synthetic peptide
  XENP018407 vhCDR3
YYGNYGGYFDV

SEQ ID NO: 19376 - protein, 214 aa, Artificial Sequence
  Description of Artificial Sequence: Synthetic polypeptide
  XENP018407 1G6_H1_L1.60_IgG1_PVA_/S267K Light Chain
SIVMTQSPATLSVSPGERATLSCRASQSVSNDVAWYQQKPGQSPRLLINAASHRYTGVPDRFTGSGYGTEFTLTISSLQSEDFAVYFCQQDYSSPRTFGGGTKVEIKRTVAAPSVFIFPPSDEQLKSGTASVVCLLNNFYPREAKVQWKVDNALQSGNSQESVTEQDSKDSTYSLSSTLTLSKADYEKHKVYACEVTHQGLSSPVTKSFNRGEC

SEQ ID NO: 19377 - protein, 107 aa, Artificial Sequence; identical to SEQ ID NO: 13710
  Description of Artificial Sequence: Synthetic polypeptide
  VL of XENP018407

SEQ ID NO: 19378 - protein, 11 aa, Artificial Sequence
  Description of Artificial Sequence: Synthetic peptide
  XENP018407 vlCDR1
RASQSVSNDVA

SEQ ID NO: 19379 - protein, 7 aa, Artificial Sequence
  Description of Artificial Sequence: Synthetic peptide
  XENP018407 vlCDR2
AASHRYT

SEQ ID NO: 19380 - protein, 9 aa, Artificial Sequence
  Description of Artificial Sequence: Synthetic peptide
  XENP018407 vlCDR3
QQDYSSPRT

SEQ ID NO: 19381 - protein, 451 aa, Artificial Sequence; identical to SEQ ID NO: 16221
  Description of Artificial Sequence: Synthetic polypeptide
  XENP018408 1G6_H1_L1.61_IgG1_PVA_/S267K Heavy Chain

SEQ ID NO: 19382 - protein, 122 aa, Artificial Sequence; identical to SEQ ID NO: 10922
  Description of Artificial Sequence: Synthetic polypeptide
  VH of XENP018408

SEQ ID NO: 19383 - protein, 5 aa, Artificial Sequence
  Description of Artificial Sequence: Synthetic peptide
  XENP018408 vhCDR1
NYWMN

SEQ ID NO: 19384 - protein, 19 aa, Artificial Sequence
  Description of Artificial Sequence: Synthetic peptide
  XENP018408 vhCDR2
EIRLKSNNYATHYAEPVKG

SEQ ID NO: 19385 - protein, 11 aa, Artificial Sequence
  Description of Artificial Sequence: Synthetic peptide
  XENP018408 vhCDR3
YYGNYGGYFDV

SEQ ID NO: 19386 - protein, 214 aa, Artificial Sequence
  Description of Artificial Sequence: Synthetic polypeptide
  XENP018408 1G6_H1_L1.61_IgG1_PVA_/S267K Light Chain
SIVMTQSPATLSVSPGERATLSCRASQSVSNDVAWYQQKPGQSPRLLINQASHRYTGVPDRFTGSGYGTEFTLTISSLQSEDFAVYFCQQDYSSPRTFGGGTKVEIKRTVAAPSVFIFPPSDEQLKSGTASVVCLLNNFYPREAKVQWKVDNALQSGNSQESVTEQDSKDSTYSLSSTLTLSKADYEKHKVYACEVTHQGLSSPVTKSFNRGEC

SEQ ID NO: 19387 - protein, 107 aa, Artificial Sequence; identical to SEQ ID NO: 13719
  Description of Artificial Sequence: Synthetic polypeptide
  VL of XENP018408

SEQ ID NO: 19388 - protein, 11 aa, Artificial Sequence
  Description of Artificial Sequence: Synthetic peptide
  XENP018408 vlCDR1
RASQSVSNDVA

SEQ ID NO: 19389 - protein, 7 aa, Artificial Sequence
  Description of Artificial Sequence: Synthetic peptide
  XENP018408 vlCDR2
QASHRYT

SEQ ID NO: 19390 - protein, 9 aa, Artificial Sequence
  Description of Artificial Sequence: Synthetic peptide
  XENP018408 vlCDR3
QQDYSSPRT

SEQ ID NO: 19391 - protein, 451 aa, Artificial Sequence; identical to SEQ ID NO: 16221
  Description of Artificial Sequence: Synthetic polypeptide
  XENP018409 1G6_H1_L1.62_IgG1_PVA_/S267K Heavy Chain

SEQ ID NO: 19392 - protein, 122 aa, Artificial Sequence; identical to SEQ ID NO: 10922
  Description of Artificial Sequence: Synthetic polypeptide
  VH of XENP018409

SEQ ID NO: 19393 - protein, 5 aa, Artificial Sequence
  Description of Artificial Sequence: Synthetic peptide
  XENP018409 vhCDR1
NYWMN

SEQ ID NO: 19394 - protein, 19 aa, Artificial Sequence
  Description of Artificial Sequence: Synthetic peptide
  XENP018409 vhCDR2
EIRLKSNNYATHYAEPVKG

SEQ ID NO: 19395 - protein, 11 aa, Artificial Sequence
  Description of Artificial Sequence: Synthetic peptide
  XENP018409 vhCDR3
YYGNYGGYFDV

SEQ ID NO: 19396 - protein, 214 aa, Artificial Sequence
  Description of Artificial Sequence: Synthetic polypeptide
  XENP018409 1G6_H1_L1.62_IgG1_PVA_/S267K Light Chain
SIVMTQSPATLSVSPGERATLSCRASQSVSNDVAWYQQKPGQSPRLLINDASHRYTGVPDRFTGSGYGTEFTLTISSLQSEDFAVYFCQQDYSSPRTFGGGTKVEIKRTVAAPSVFIFPPSDEQLKSGTASVVCLLNNFYPREAKVQWKVDNALQSGNSQESVTEQDSKDSTYSLSSTLTLSKADYEKHKVYACEVTHQGLSSPVTKSFNRGEC

SEQ ID NO: 19397 - protein, 107 aa, Artificial Sequence; identical to SEQ ID NO: 13728
  Description of Artificial Sequence: Synthetic polypeptide
  VL of XENP018409

SEQ ID NO: 19398 - protein, 11 aa, Artificial Sequence
  Description of Artificial Sequence: Synthetic peptide
  XENP018409 vlCDR1
RASQSVSNDVA

SEQ ID NO: 19399 - protein, 7 aa, Artificial Sequence
  Description of Artificial Sequence: Synthetic peptide
  XENP018409 vlCDR2
DASHRYT

SEQ ID NO: 19400 - protein, 9 aa, Artificial Sequence
  Description of Artificial Sequence: Synthetic peptide
  XENP018409 vlCDR3
QQDYSSPRT

SEQ ID NO: 19401 - protein, 451 aa, Artificial Sequence; identical to SEQ ID NO: 16221
  Description of Artificial Sequence: Synthetic polypeptide
  XENP018410 1G6_H1_L1.63_IgG1_PVA_/S267K Heavy Chain

SEQ ID NO: 19402 - protein, 122 aa, Artificial Sequence; identical to SEQ ID NO: 10922
  Description of Artificial Sequence: Synthetic polypeptide
  VH of XENP018410

SEQ ID NO: 19403 - protein, 5 aa, Artificial Sequence
  Description of Artificial Sequence: Synthetic peptide
  XENP018410 vhCDR1
NYWMN

SEQ ID NO: 19404 - protein, 19 aa, Artificial Sequence
  Description of Artificial Sequence: Synthetic peptide
  XENP018410 vhCDR2
EIRLKSNNYATHYAEPVKG

SEQ ID NO: 19405 - protein, 11 aa, Artificial Sequence
  Description of Artificial Sequence: Synthetic peptide
  XENP018410 vhCDR3
YYGNYGGYFDV

SEQ ID NO: 19406 - protein, 214 aa, Artificial Sequence
  Description of Artificial Sequence: Synthetic polypeptide
  XENP018410 1G6_H1_L1.63_IgG1_PVA_/S267K Light Chain
SIVMTQSPATLSVSPGERATLSCRASQSVSNDVAWYQQKPGQSPRLLINKASHRYTGVPDRFTGSGYGTEFTLTISSLQSEDFAVYFCQQDYSSPRTFGGGTKVEIKRTVAAPSVFIFPPSDEQLKSGTASVVCLLNNFYPREAKVQWKVDNALQSGNSQESVTEQDSKDSTYSLSSTLTLSKADYEKHKVYACEVTHQGLSSPVTKSFNRGEC

SEQ ID NO: 19407 - protein, 107 aa, Artificial Sequence; identical to SEQ ID NO: 13737
  Description of Artificial Sequence: Synthetic polypeptide
  VL of XENP018410

SEQ ID NO: 19408 - protein, 11 aa, Artificial Sequence
  Description of Artificial Sequence: Synthetic peptide
  XENP018410 vlCDR1
RASQSVSNDVA

SEQ ID NO: 19409 - protein, 7 aa, Artificial Sequence
  Description of Artificial Sequence: Synthetic peptide
  XENP018410 vlCDR2
KASHRYT

SEQ ID NO: 19410 - protein, 9 aa, Artificial Sequence
  Description of Artificial Sequence: Synthetic peptide
  XENP018410 vlCDR3
QQDYSSPRT

SEQ ID NO: 19411 - protein, 451 aa, Artificial Sequence; identical to SEQ ID NO: 16221
  Description of Artificial Sequence: Synthetic polypeptide
  XENP018411 1G6_H1_L1.64_IgG1_PVA_/S267K Heavy Chain

SEQ ID NO: 19412 - protein, 122 aa, Artificial Sequence; identical to SEQ ID NO: 10922
  Description of Artificial Sequence: Synthetic polypeptide
  VH of XENP018411

SEQ ID NO: 19413 - protein, 5 aa, Artificial Sequence
  Description of Artificial Sequence: Synthetic peptide
  XENP018411 vhCDR1
NYWMN

SEQ ID NO: 19414 - protein, 19 aa, Artificial Sequence
  Description of Artificial Sequence: Synthetic peptide
  XENP018411 vhCDR2
EIRLKSNNYATHYAEPVKG

SEQ ID NO: 19415 - protein, 11 aa, Artificial Sequence
  Description of Artificial Sequence: Synthetic peptide
  XENP018411 vhCDR3
YYGNYGGYFDV

SEQ ID NO: 19416 - protein, 214 aa, Artificial Sequence
  Description of Artificial Sequence: Synthetic polypeptide
  XENP018411 1G6_H1_L1.64_IgG1_PVA_/S267K Light Chain
SIVMTQSPATLSVSPGERATLSCRASQSVSNDVAWYQQKPGQSPRLLINYASYRYTGVPDRFTGSGYGTEFTLTISSLQSEDFAVYFCQQDYSSPRTFGGGTKVEIKRTVAAPSVFIFPPSDEQLKSGTASVVCLLNNFYPREAKVQWKVDNALQSGNSQESVTEQDSKDSTYSLSSTLTLSKADYEKHKVYACEVTHQGLSSPVTKSFNRGEC

SEQ ID NO: 19417 - protein, 107 aa, Artificial Sequence; identical to SEQ ID NO: 13746
  Description of Artificial Sequence: Synthetic polypeptide
  VL of XENP018411

SEQ ID NO: 19418 - protein, 11 aa, Artificial Sequence
  Description of Artificial Sequence: Synthetic peptide
  XENP018411 vlCDR1
RASQSVSNDVA

SEQ ID NO: 19419 - protein, 7 aa, Artificial Sequence
  Description of Artificial Sequence: Synthetic peptide
  XENP018411 vlCDR2
YASYRYT

SEQ ID NO: 19420 - protein, 9 aa, Artificial Sequence
  Description of Artificial Sequence: Synthetic peptide
  XENP018411 vlCDR3
QQDYSSPRT

SEQ ID NO: 19421 - protein, 451 aa, Artificial Sequence; identical to SEQ ID NO: 16221
  Description of Artificial Sequence: Synthetic polypeptide
  XENP018412 1G6_H1_L1.65_IgG1_PVA_/S267K Heavy Chain

SEQ ID NO: 19422 - protein, 122 aa, Artificial Sequence; identical to SEQ ID NO: 10922
  Description of Artificial Sequence: Synthetic polypeptide
  VH of XENP018412

SEQ ID NO: 19423 - protein, 5 aa, Artificial Sequence
  Description of Artificial Sequence: Synthetic peptide
  XENP018412 vhCDR1
NYWMN

SEQ ID NO: 19424 - protein, 19 aa, Artificial Sequence
  Description of Artificial Sequence: Synthetic peptide
  XENP018412 vhCDR2
EIRLKSNNYATHYAEPVKG

SEQ ID NO: 19425 - protein, 11 aa, Artificial Sequence
  Description of Artificial Sequence: Synthetic peptide
  XENP018412 vhCDR3
YYGNYGGYFDV

SEQ ID NO: 19426 - protein, 214 aa, Artificial Sequence
  Description of Artificial Sequence: Synthetic polypeptide
  XENP018412 1G6_H1_L1.65_IgG1_PVA_/S267K Light Chain
SIVMTQSPATLSVSPGERATLSCRASQSVSNDVAWYQQKPGQSPRLLINYASQRYTGVPDRFTGSGYGTEFTLTISSLQSEDFAVYFCQQDYSSPRTFGGGTKVEIKRTVAAPSVFIFPPSDEQLKSGTASVVCLLNNFYPREAKVQWKVDNALQSGNSQESVTEQDSKDSTYSLSSTLTLSKADYEKHKVYACEVTHQGLSSPVTKSFNRGEC

SEQ ID NO: 19427 - protein, 107 aa, Artificial Sequence; identical to SEQ ID NO: 13755
  Description of Artificial Sequence: Synthetic polypeptide
  VL of XENP018412

SEQ ID NO: 19428 - protein, 11 aa, Artificial Sequence
  Description of Artificial Sequence: Synthetic peptide
  XENP018412 vlCDR1
RASQSVSNDVA

SEQ ID NO: 19429 - protein, 7 aa, Artificial Sequence
  Description of Artificial Sequence: Synthetic peptide
  XENP018412 vlCDR2
YASQRYT

SEQ ID NO: 19430 - protein, 9 aa, Artificial Sequence
  Description of Artificial Sequence: Synthetic peptide
  XENP018412 vlCDR3
QQDYSSPRT

SEQ ID NO: 19431 - protein, 451 aa, Artificial Sequence; identical to SEQ ID NO: 16221
  Description of Artificial Sequence: Synthetic polypeptide
  XENP018413 1G6_H1_L1.66_IgG1_PVA_/S267K Heavy Chain

SEQ ID NO: 19432 - protein, 122 aa, Artificial Sequence; identical to SEQ ID NO: 10922
  Description of Artificial Sequence: Synthetic polypeptide
  VH of XENP018413

SEQ ID NO: 19433 - protein, 5 aa, Artificial Sequence
  Description of Artificial Sequence: Synthetic peptide
  XENP018413 vhCDR1
NYWMN

SEQ ID NO: 19434 - protein, 19 aa, Artificial Sequence
  Description of Artificial Sequence: Synthetic peptide
  XENP018413 vhCDR2
EIRLKSNNYATHYAEPVKG

SEQ ID NO: 19435 - protein, 11 aa, Artificial Sequence
  Description of Artificial Sequence: Synthetic peptide
  XENP018413 vhCDR3
YYGNYGGYFDV

SEQ ID NO: 19436 - protein, 214 aa, Artificial Sequence
  Description of Artificial Sequence: Synthetic polypeptide
  XENP018413 1G6_H1_L1.66_IgG1_PVA_/S267K Light Chain
SIVMTQSPATLSVSPGERATLSCRASQSVSNDVAWYQQKPGQSPRLLINYASDRYTGVPDRFTGSGYGTEFTLTISSLQSEDFAVYFCQQDYSSPRTFGGGTKVEIKRTVAAPSVFIFPPSDEQLKSGTASVVCLLNNFYPREAKVQWKVDNALQSGNSQESVTEQDSKDSTYSLSSTLTLSKADYEKHKVYACEVTHQGLSSPVTKSFNRGEC

SEQ ID NO: 19437 - protein, 107 aa, Artificial Sequence; identical to SEQ ID NO: 13764
  Description of Artificial Sequence: Synthetic polypeptide
  VL of XENP018413

SEQ ID NO: 19438 - protein, 11 aa, Artificial Sequence
  Description of Artificial Sequence: Synthetic peptide
  XENP018413 vlCDR1
RASQSVSNDVA

SEQ ID NO: 19439 - protein, 7 aa, Artificial Sequence
  Description of Artificial Sequence: Synthetic peptide
  XENP018413 vlCDR2
YASDRYT

SEQ ID NO: 19440 - protein, 9 aa, Artificial Sequence
  Description of Artificial Sequence: Synthetic peptide
  XENP018413 vlCDR3
QQDYSSPRT

SEQ ID NO: 19441 - protein, 451 aa, Artificial Sequence; identical to SEQ ID NO: 16221
  Description of Artificial Sequence: Synthetic polypeptide
  XENP018414 1G6_H1_L1.67_IgG1_PVA_/S267K Heavy Chain

SEQ ID NO: 19442 - protein, 122 aa, Artificial Sequence; identical to SEQ ID NO: 10922
  Description of Artificial Sequence: Synthetic polypeptide
  VH of XENP018414

SEQ ID NO: 19443 - protein, 5 aa, Artificial Sequence
  Description of Artificial Sequence: Synthetic peptide
  XENP018414 vhCDR1
NYWMN

SEQ ID NO: 19444 - protein, 19 aa, Artificial Sequence
  Description of Artificial Sequence: Synthetic peptide
  XENP018414 vhCDR2
EIRLKSNNYATHYAEPVKG

SEQ ID NO: 19445 - protein, 11 aa, Artificial Sequence
  Description of Artificial Sequence: Synthetic peptide
  XENP018414 vhCDR3
YYGNYGGYFDV

SEQ ID NO: 19446 - protein, 214 aa, Artificial Sequence
  Description of Artificial Sequence: Synthetic polypeptide
  XENP018414 1G6_H1_L1.67_IgG1_PVA_/S267K Light Chain
SIVMTQSPATLSVSPGERATLSCRASQSVSNDVAWYQQKPGQSPRLLINYASWRYTGVPDRFTGSGYGTEFTLTISSLQSEDFAVYFCQQDYSSPRTFGGGTKVEIKRTVAAPSVFIFPPSDEQLKSGTASVVCLLNNFYPREAKVQWKVDNALQSGNSQESVTEQDSKDSTYSLSSTLTLSKADYEKHKVYACEVTHQGLSSPVTKSFNRGEC

SEQ ID NO: 19447 - protein, 107 aa, Artificial Sequence; identical to SEQ ID NO: 13773
  Description of Artificial Sequence: Synthetic polypeptide
  VL of XENP018414

SEQ ID NO: 19448 - protein, 11 aa, Artificial Sequence
  Description of Artificial Sequence: Synthetic peptide
  XENP018414 vlCDR1
RASQSVSNDVA

SEQ ID NO: 19449 - protein, 7 aa, Artificial Sequence
  Description of Artificial Sequence: Synthetic peptide
  XENP018414 vlCDR2
YASWRYT

SEQ ID NO: 19450 - protein, 9 aa, Artificial Sequence
  Description of Artificial Sequence: Synthetic peptide
  XENP018414 vlCDR3
QQDYSSPRT

SEQ ID NO: 19451 - protein, 451 aa, Artificial Sequence; identical to SEQ ID NO: 16221
  Description of Artificial Sequence: Synthetic polypeptide
  XENP018415 1G6_H1_L1.68_IgG1_PVA_/S267K Heavy Chain

SEQ ID NO: 19452 - protein, 122 aa, Artificial Sequence; identical to SEQ ID NO: 10922
  Description of Artificial Sequence: Synthetic polypeptide
  VH of XENP018415

SEQ ID NO: 19453 - protein, 5 aa, Artificial Sequence
  Description of Artificial Sequence: Synthetic peptide
  XENP018415 vhCDR1
NYWMN

SEQ ID NO: 19454 - protein, 19 aa, Artificial Sequence
  Description of Artificial Sequence: Synthetic peptide
  XENP018415 vhCDR2
EIRLKSNNYATHYAEPVKG

SEQ ID NO: 19455 - protein, 11 aa, Artificial Sequence
  Description of Artificial Sequence: Synthetic peptide
  XENP018415 vhCDR3
YYGNYGGYFDV

SEQ ID NO: 19456 - protein, 214 aa, Artificial Sequence
  Description of Artificial Sequence: Synthetic polypeptide
  XENP018415 1G6_H1_L1.68_IgG1_PVA_/S267K Light Chain
SIVMTQSPATLSVSPGERATLSCRASQSVSNDVAWYQQKPGQSPRLLINYASARYTGVPDRFTGSGYGTEFTLTISSLQSEDFAVYFCQQDYSSPRTFGGGTKVEIKRTVAAPSVFIFPPSDEQLKSGTASVVCLLNNFYPREAKVQWKVDNALQSGNSQESVTEQDSKDSTYSLSSTLTLSKADYEKHKVYACEVTHQGLSSPVTKSFNRGEC

SEQ ID NO: 19457 - protein, 107 aa, Artificial Sequence; identical to SEQ ID NO: 13782
  Description of Artificial Sequence: Synthetic polypeptide
  VL of XENP018415

SEQ ID NO: 19458 - protein, 11 aa, Artificial Sequence
  Description of Artificial Sequence: Synthetic peptide
  XENP018415 vlCDR1
RASQSVSNDVA

SEQ ID NO: 19459 - protein, 7 aa, Artificial Sequence
  Description of Artificial Sequence: Synthetic peptide
  XENP018415 vlCDR2
YASARYT

SEQ ID NO: 19460 - protein, 9 aa, Artificial Sequence
  Description of Artificial Sequence: Synthetic peptide
  XENP018415 vlCDR3
QQDYSSPRT

SEQ ID NO: 19461 - protein, 451 aa, Artificial Sequence; identical to SEQ ID NO: 16221
  Description of Artificial Sequence: Synthetic polypeptide
  XENP018416 1G6_H1_L1.69_IgG1_PVA_/S267K Heavy Chain

SEQ ID NO: 19462 - protein, 122 aa, Artificial Sequence; identical to SEQ ID NO: 10922
  Description of Artificial Sequence: Synthetic polypeptide
  VH of XENP018416

SEQ ID NO: 19463 - protein, 5 aa, Artificial Sequence
  Description of Artificial Sequence: Synthetic peptide
  XENP018416 vhCDR1
NYWMN

SEQ ID NO: 19464 - protein, 19 aa, Artificial Sequence
  Description of Artificial Sequence: Synthetic peptide
  XENP018416 vhCDR2
EIRLKSNNYATHYAEPVKG

SEQ ID NO: 19465 - protein, 11 aa, Artificial Sequence
  Description of Artificial Sequence: Synthetic peptide
  XENP018416 vhCDR3
YYGNYGGYFDV

SEQ ID NO: 19466 - protein, 214 aa, Artificial Sequence
  Description of Artificial Sequence: Synthetic polypeptide
  XENP018416 1G6_H1_L1.69_IgG1_PVA_/S267K Light Chain
SIVMTQSPATLSVSPGERATLSCRASQSVSNDVAWYQQKPGQSPRLLINYASTRYTGVPDRFTGSGYGTEFTLTISSLQSEDFAVYFCQQDYSSPRTFGGGTKVEIKRTVAAPSVFIFPPSDEQLKSGTASVVCLLNNFYPREAKVQWKVDNALQSGNSQESVTEQDSKDSTYSLSSTLTLSKADYEKHKVYACEVTHQGLSSPVTKSFNRGEC

SEQ ID NO: 19467 - protein, 107 aa, Artificial Sequence; identical to SEQ ID NO: 13791
  Description of Artificial Sequence: Synthetic polypeptide
  VL of XENP018416

SEQ ID NO: 19468 - protein, 11 aa, Artificial Sequence
  Description of Artificial Sequence: Synthetic peptide
  XENP018416 vlCDR1
RASQSVSNDVA

SEQ ID NO: 19469 - protein, 7 aa, Artificial Sequence
  Description of Artificial Sequence: Synthetic peptide
  XENP018416 vlCDR2
YASTRYT

SEQ ID NO: 19470 - protein, 9 aa, Artificial Sequence
  Description of Artificial Sequence: Synthetic peptide
  XENP018416 vlCDR3
QQDYSSPRT

SEQ ID NO: 19471 - protein, 451 aa, Artificial Sequence; identical to SEQ ID NO: 16221
  Description of Artificial Sequence: Synthetic polypeptide
  XENP018417 1G6_H1_L1.70_IgG1_PVA_/S267K Heavy Chain

SEQ ID NO: 19472 - protein, 122 aa, Artificial Sequence; identical to SEQ ID NO: 10922
  Description of Artificial Sequence: Synthetic polypeptide
  VH of XENP018417

SEQ ID NO: 19473 - protein, 5 aa, Artificial Sequence
  Description of Artificial Sequence: Synthetic peptide
  XENP018417 vhCDR1
NYWMN

SEQ ID NO: 19474 - protein, 19 aa, Artificial Sequence
  Description of Artificial Sequence: Synthetic peptide
  XENP018417 vhCDR2
EIRLKSNNYATHYAEPVKG

SEQ ID NO: 19475 - protein, 11 aa, Artificial Sequence
  Description of Artificial Sequence: Synthetic peptide
  XENP018417 vhCDR3
YYGNYGGYFDV

SEQ ID NO: 19476 - protein, 214 aa, Artificial Sequence
  Description of Artificial Sequence: Synthetic polypeptide
  XENP018417 1G6_H1_L1.70_IgG1_PVA_/S267K Light Chain
SIVMTQSPATLSVSPGERATLSCRASQSVSNDVAWYQQKPGQSPRLLINYASKRYTGVPDRFTGSGYGTEFTLTISSLQSEDFAVYFCQQDYSSPRTFGGGTKVEIKRTVAAPSVFIFPPSDEQLKSGTASVVCLLNNFYPREAKVQWKVDNALQSGNSQESVTEQDSKDSTYSLSSTLTLSKADYEKHKVYACEVTHQGLSSPVTKSFNRGEC

SEQ ID NO: 19477 - protein, 107 aa, Artificial Sequence; identical to SEQ ID NO: 13800
  Description of Artificial Sequence: Synthetic polypeptide
  VL of XENP018417

SEQ ID NO: 19478 - protein, 11 aa, Artificial Sequence
  Description of Artificial Sequence: Synthetic peptide
  XENP018417 vlCDR1
RASQSVSNDVA

SEQ ID NO: 19479 - protein, 7 aa, Artificial Sequence
  Description of Artificial Sequence: Synthetic peptide
  XENP018417 vlCDR2
YASKRYT

SEQ ID NO: 19480 - protein, 9 aa, Artificial Sequence
  Description of Artificial Sequence: Synthetic peptide
  XENP018417 vlCDR3
QQDYSSPRT

SEQ ID NO: 19481 - protein, 451 aa, Artificial Sequence; identical to SEQ ID NO: 16221
  Description of Artificial Sequence: Synthetic polypeptide
  XENP018418 1G6_H1_L1.71_IgG1_PVA_/S267K Heavy Chain

SEQ ID NO: 19482 - protein, 122 aa, Artificial Sequence; identical to SEQ ID NO: 10922
  Description of Artificial Sequence: Synthetic polypeptide
  VH of XENP018418

SEQ ID NO: 19483 - protein, 5 aa, Artificial Sequence
  Description of Artificial Sequence: Synthetic peptide
  XENP018418 vhCDR1
NYWMN

SEQ ID NO: 19484 - protein, 19 aa, Artificial Sequence
  Description of Artificial Sequence: Synthetic peptide
  XENP018418 vhCDR2
EIRLKSNNYATHYAEPVKG

SEQ ID NO: 19485 - protein, 11 aa, Artificial Sequence
  Description of Artificial Sequence: Synthetic peptide
  XENP018418 vhCDR3
YYGNYGGYFDV

SEQ ID NO: 19486 - protein, 214 aa, Artificial Sequence
  Description of Artificial Sequence: Synthetic polypeptide
  XENP018418 1G6_H1_L1.71_IgG1_PVA_/S267K Light Chain
SIVMTQSPATLSVSPGERATLSCRASQSVSNDVAWYQQKPGQSPRLLINYASGRYTGVPDRFTGSGYGTEFTLTISSLQSEDFAVYFCQQDYSSPRTFGGGTKVEIKRTVAAPSVFIFPPSDEQLKSGTASVVCLLNNFYPREAKVQWKVDNALQSGNSQESVTEQDSKDSTYSLSSTLTLSKADYEKHKVYACEVTHQGLSSPVTKSFNRGEC

SEQ ID NO: 19487 - protein, 107 aa, Artificial Sequence; identical to SEQ ID NO: 13809
  Description of Artificial Sequence: Synthetic polypeptide
  VL of XENP018418

SEQ ID NO: 19488 - protein, 11 aa, Artificial Sequence
  Description of Artificial Sequence: Synthetic peptide
  XENP018418 vlCDR1
RASQSVSNDVA

SEQ ID NO: 19489 - protein, 7 aa, Artificial Sequence
  Description of Artificial Sequence: Synthetic peptide
  XENP018418 vlCDR2
YASGRYT

SEQ ID NO: 19490 - protein, 9 aa, Artificial Sequence
  Description of Artificial Sequence: Synthetic peptide
  XENP018418 vlCDR3
QQDYSSPRT

SEQ ID NO: 19491 - protein, 451 aa, Artificial Sequence; identical to SEQ ID NO: 16221
  Description of Artificial Sequence: Synthetic polypeptide
  XENP018419 1G6_H1_L1.72_IgG1_PVA_/S267K Heavy Chain

SEQ ID NO: 19492 - protein, 122 aa, Artificial Sequence; identical to SEQ ID NO: 10922
  Description of Artificial Sequence: Synthetic polypeptide
  VH of XENP018419

SEQ ID NO: 19493 - protein, 5 aa, Artificial Sequence
  Description of Artificial Sequence: Synthetic peptide
  XENP018419 vhCDR1
NYWMN

SEQ ID NO: 19494 - protein, 19 aa, Artificial Sequence
  Description of Artificial Sequence: Synthetic peptide
  XENP018419 vhCDR2
EIRLKSNNYATHYAEPVKG

SEQ ID NO: 19495 - protein, 11 aa, Artificial Sequence
  Description of Artificial Sequence: Synthetic peptide
  XENP018419 vhCDR3
YYGNYGGYFDV

SEQ ID NO: 19496 - protein, 214 aa, Artificial Sequence
  Description of Artificial Sequence: Synthetic polypeptide
  XENP018419 1G6_H1_L1.72_IgG1_PVA_/S267K Light Chain
SIVMTQSPATLSVSPGERATLSCRASQSVSNDVAWYQQKPGQSPRLLINYASLRYTGVPDRFTGSGYGTEFTLTISSLQSEDFAVYFCQQDYSSPRTFGGGTKVEIKRTVAAPSVFIFPPSDEQLKSGTASVVCLLNNFYPREAKVQWKVDNALQSGNSQESVTEQDSKDSTYSLSSTLTLSKADYEKHKVYACEVTHQGLSSPVTKSFNRGEC

SEQ ID NO: 19497 - protein, 107 aa, Artificial Sequence; identical to SEQ ID NO: 13818
  Description of Artificial Sequence: Synthetic polypeptide
  VL of XENP018419

SEQ ID NO: 19498 - protein, 11 aa, Artificial Sequence
  Description of Artificial Sequence: Synthetic peptide
  XENP018419 vlCDR1
RASQSVSNDVA

SEQ ID NO: 19499 - protein, 7 aa, Artificial Sequence
  Description of Artificial Sequence: Synthetic peptide
  XENP018419 vlCDR2
YASLRYT

SEQ ID NO: 19500 - protein, 9 aa, Artificial Sequence
  Description of Artificial Sequence: Synthetic peptide
  XENP018419 vlCDR3
QQDYSSPRT

SEQ ID NO: 19501 - protein, 451 aa, Artificial Sequence; identical to SEQ ID NO: 16221
  Description of Artificial Sequence: Synthetic polypeptide
  XENP018420 1G6_H1_L1.73_IgG1_PVA_/S267K Heavy Chain

SEQ ID NO: 19502 - protein, 122 aa, Artificial Sequence; identical to SEQ ID NO: 10922
  Description of Artificial Sequence: Synthetic polypeptide
  VH of XENP018420

SEQ ID NO: 19503 - protein, 5 aa, Artificial Sequence
  Description of Artificial Sequence: Synthetic peptide
  XENP018420 vhCDR1
NYWMN

SEQ ID NO: 19504 - protein, 19 aa, Artificial Sequence
  Description of Artificial Sequence: Synthetic peptide
  XENP018420 vhCDR2
EIRLKSNNYATHYAEPVKG

SEQ ID NO: 19505 - protein, 11 aa, Artificial Sequence
  Description of Artificial Sequence: Synthetic peptide
  XENP018420 vhCDR3
YYGNYGGYFDV

SEQ ID NO: 19506 - protein, 214 aa, Artificial Sequence
  Description of Artificial Sequence: Synthetic polypeptide
  XENP018420 1G6_H1_L1.73_IgG1_PVA_/S267K Light Chain
SIVMTQSPATLSVSPGERATLSCRASQSVSNDVAWYQQKPGQSPRLLINYASHLYTGVPDRFTGSGYGTEFTLTISSLQSEDFAVYFCQQDYSSPRTFGGGTKVEIKRTVAAPSVFIFPPSDEQLKSGTASVVCLLNNFYPREAKVQWKVDNALQSGNSQESVTEQDSKDSTYSLSSTLTLSKADYEKHKVYACEVTHQGLSSPVTKSFNRGEC

SEQ ID NO: 19507 - protein, 107 aa, Artificial Sequence; identical to SEQ ID NO: 13827
  Description of Artificial Sequence: Synthetic polypeptide
  VL of XENP018420

SEQ ID NO: 19508 - protein, 11 aa, Artificial Sequence
  Description of Artificial Sequence: Synthetic peptide
  XENP018420 vlCDR1
RASQSVSNDVA

SEQ ID NO: 19509 - protein, 7 aa, Artificial Sequence
  Description of Artificial Sequence: Synthetic peptide
  XENP018420 vlCDR2
YASHLYT

SEQ ID NO: 19510 - protein, 9 aa, Artificial Sequence
  Description of Artificial Sequence: Synthetic peptide
  XENP018420 vlCDR3
QQDYSSPRT

SEQ ID NO: 19511 - protein, 451 aa, Artificial Sequence; identical to SEQ ID NO: 16221
  Description of Artificial Sequence: Synthetic polypeptide
  XENP018421 1G6_H1_L1.74_IgG1_PVA_/S267K Heavy Chain

SEQ ID NO: 19512 - protein, 122 aa, Artificial Sequence; identical to SEQ ID NO: 10922
  Description of Artificial Sequence: Synthetic polypeptide
  VH of XENP018421

SEQ ID NO: 19513 - protein, 5 aa, Artificial Sequence
  Description of Artificial Sequence: Synthetic peptide
  XENP018421 vhCDR1
NYWMN

SEQ ID NO: 19514 - protein, 19 aa, Artificial Sequence
  Description of Artificial Sequence: Synthetic peptide
  XENP018421 vhCDR2
EIRLKSNNYATHYAEPVKG

SEQ ID NO: 19515 - protein, 11 aa, Artificial Sequence
  Description of Artificial Sequence: Synthetic peptide
  XENP018421 vhCDR3
YYGNYGGYFDV

SEQ ID NO: 19516 - protein, 214 aa, Artificial Sequence
  Description of Artificial Sequence: Synthetic polypeptide
  XENP018421 1G6_H1_L1.74_IgG1_PVA_/S267K Light Chain
SIVMTQSPATLSVSPGERATLSCRASQSVSNDVAWYQQKPGQSPRLLINYASHWYTGVPDRFTGSGYGTEFTLTISSLQSEDFAVYFCQQDYSSPRTFGGGTKVEIKRTVAAPSVFIFPPSDEQLKSGTASVVCLLNNFYPREAKVQWKVDNALQSGNSQESVTEQDSKDSTYSLSSTLTLSKADYEKHKVYACEVTHQGLSSPVTKSFNRGEC

SEQ ID NO: 19517 - protein, 107 aa, Artificial Sequence; identical to SEQ ID NO: 13836
  Description of Artificial Sequence: Synthetic polypeptide
  VL of XENP018421

SEQ ID NO: 19518 - protein, 11 aa, Artificial Sequence
  Description of Artificial Sequence: Synthetic peptide
  XENP018421 vlCDR1
RASQSVSNDVA

SEQ ID NO: 19519 - protein, 7 aa, Artificial Sequence
  Description of Artificial Sequence: Synthetic peptide
  XENP018421 vlCDR2
YASHWYT

SEQ ID NO: 19520 - protein, 9 aa, Artificial Sequence
  Description of Artificial Sequence: Synthetic peptide
  XENP018421 vlCDR3
QQDYSSPRT

SEQ ID NO: 19521 - protein, 451 aa, Artificial Sequence; identical to SEQ ID NO: 16221
  Description of Artificial Sequence: Synthetic polypeptide
  XENP018422 1G6_H1_L1.75_IgG1_PVA_/S267K Heavy Chain

SEQ ID NO: 19522 - protein, 122 aa, Artificial Sequence; identical to SEQ ID NO: 10922
  Description of Artificial Sequence: Synthetic polypeptide
  VH of XENP018422

SEQ ID NO: 19523 - protein, 5 aa, Artificial Sequence
  Description of Artificial Sequence: Synthetic peptide
  XENP018422 vhCDR1
NYWMN

SEQ ID NO: 19524 - protein, 19 aa, Artificial Sequence
  Description of Artificial Sequence: Synthetic peptide
  XENP018422 vhCDR2
EIRLKSNNYATHYAEPVKG

SEQ ID NO: 19525 - protein, 11 aa, Artificial Sequence
  Description of Artificial Sequence: Synthetic peptide
  XENP018422 vhCDR3
YYGNYGGYFDV

SEQ ID NO: 19526 - protein, 214 aa, Artificial Sequence
  Description of Artificial Sequence: Synthetic polypeptide
  XENP018422 1G6_H1_L1.75_IgG1_PVA_/S267K Light Chain
SIVMTQSPATLSVSPGERATLSCRASQSVSNDVAWYQQKPGQSPRLLINYASHSYTGVPDRFTGSGYGTEFTLTISSLQSEDFAVYFCQQDYSSPRTFGGGTKVEIKRTVAAPSVFIFPPSDEQLKSGTASVVCLLNNFYPREAKVQWKVDNALQSGNSQESVTEQDSKDSTYSLSSTLTLSKADYEKHKVYACEVTHQGLSSPVTKSFNRGEC

SEQ ID NO: 19527 - protein, 107 aa, Artificial Sequence; identical to SEQ ID NO: 13845
  Description of Artificial Sequence: Synthetic polypeptide
  VL of XENP018422

SEQ ID NO: 19528 - protein, 11 aa, Artificial Sequence
  Description of Artificial Sequence: Synthetic peptide
  XENP018422 vlCDR1
RASQSVSNDVA

SEQ ID NO: 19529 - protein, 7 aa, Artificial Sequence
  Description of Artificial Sequence: Synthetic peptide
  XENP018422 vlCDR2
YASHSYT

SEQ ID NO: 19530 - protein, 9 aa, Artificial Sequence
  Description of Artificial Sequence: Synthetic peptide
  XENP018422 vlCDR3
QQDYSSPRT

SEQ ID NO: 19531 - protein, 451 aa, Artificial Sequence; identical to SEQ ID NO: 16221
  Description of Artificial Sequence: Synthetic polypeptide
  XENP018423 1G6_H1_L1.76_IgG1_PVA_/S267K Heavy Chain

SEQ ID NO: 19532 - protein, 122 aa, Artificial Sequence; identical to SEQ ID NO: 10922
  Description of Artificial Sequence: Synthetic polypeptide
  VH of XENP018423

SEQ ID NO: 19533 - protein, 5 aa, Artificial Sequence
  Description of Artificial Sequence: Synthetic peptide
  XENP018423 vhCDR1
NYWMN

SEQ ID NO: 19534 - protein, 19 aa, Artificial Sequence
  Description of Artificial Sequence: Synthetic peptide
  XENP018423 vhCDR2
EIRLKSNNYATHYAEPVKG

SEQ ID NO: 19535 - protein, 11 aa, Artificial Sequence
  Description of Artificial Sequence: Synthetic peptide
  XENP018423 vhCDR3
YYGNYGGYFDV

SEQ ID NO: 19536 - protein, 214 aa, Artificial Sequence
  Description of Artificial Sequence: Synthetic polypeptide
  XENP018423 1G6_H1_L1.76_IgG1_PVA_/S267K Light Chain
SIVMTQSPATLSVSPGERATLSCRASQSVSNDVAWYQQKPGQSPRLLINYASHRFTGVPDRFTGSGYGTEFTLTISSLQSEDFAVYFCQQDYSSPRTFGGGTKVEIKRTVAAPSVFIFPPSDEQLKSGTASVVCLLNNFYPREAKVQWKVDNALQSGNSQESVTEQDSKDSTYSLSSTLTLSKADYEKHKVYACEVTHQGLSSPVTKSFNRGEC

SEQ ID NO: 19537 - protein, 107 aa, Artificial Sequence; identical to SEQ ID NO: 13854
  Description of Artificial Sequence: Synthetic polypeptide
  VL of XENP018423

SEQ ID NO: 19538 - protein, 11 aa, Artificial Sequence
  Description of Artificial Sequence: Synthetic peptide
  XENP018423 vlCDR1
RASQSVSNDVA

SEQ ID NO: 19539 - protein, 7 aa, Artificial Sequence
  Description of Artificial Sequence: Synthetic peptide
  XENP018423 vlCDR2
YASHRFT

SEQ ID NO: 19540 - protein, 9 aa, Artificial Sequence
  Description of Artificial Sequence: Synthetic peptide
  XENP018423 vlCDR3
QQDYSSPRT

SEQ ID NO: 19541 - protein, 451 aa, Artificial Sequence; identical to SEQ ID NO: 16221
  Description of Artificial Sequence: Synthetic polypeptide
  XENP018424 1G6_H1_L1.77_IgG1_PVA_/S267K Heavy Chain

SEQ ID NO: 19542 - protein, 122 aa, Artificial Sequence; identical to SEQ ID NO: 10922
  Description of Artificial Sequence: Synthetic polypeptide
  VH of XENP018424

SEQ ID NO: 19543 - protein, 5 aa, Artificial Sequence
  Description of Artificial Sequence: Synthetic peptide
  XENP018424 vhCDR1
NYWMN

SEQ ID NO: 19544 - protein, 19 aa, Artificial Sequence
  Description of Artificial Sequence: Synthetic peptide
  XENP018424 vhCDR2
EIRLKSNNYATHYAEPVKG

SEQ ID NO: 19545 - protein, 11 aa, Artificial Sequence
  Description of Artificial Sequence: Synthetic peptide
  XENP018424 vhCDR3
YYGNYGGYFDV

SEQ ID NO: 19546 - protein, 214 aa, Artificial Sequence
  Description of Artificial Sequence: Synthetic polypeptide
  XENP018424 1G6_H1_L1.77_IgG1_PVA_/S267K Light Chain
SIVMTQSPATLSVSPGERATLSCRASQSVSNDVAWYQQKPGQSPRLLINYASHRHTGVPDRFTGSGYGTEFTLTISSLQSEDFAVYFCQQDYSSPRTFGGGTKVEIKRTVAAPSVFIFPPSDEQLKSGTASVVCLLNNFYPREAKVQWKVDNALQSGNSQESVTEQDSKDSTYSLSSTLTLSKADYEKHKVYACEVTHQGLSSPVTKSFNRGEC

SEQ ID NO: 19547 - protein, 107 aa, Artificial Sequence; identical to SEQ ID NO: 13863
  Description of Artificial Sequence: Synthetic polypeptide
  VL of XENP018424

SEQ ID NO: 19548 - protein, 11 aa, Artificial Sequence
  Description of Artificial Sequence: Synthetic peptide
  XENP018424 vlCDR1
RASQSVSNDVA

SEQ ID NO: 19549 - protein, 7 aa, Artificial Sequence
  Description of Artificial Sequence: Synthetic peptide
  XENP018424 vlCDR2
YASHRHT

SEQ ID NO: 19550 - protein, 9 aa, Artificial Sequence
  Description of Artificial Sequence: Synthetic peptide
  XENP018424 vlCDR3
QQDYSSPRT

SEQ ID NO: 19551 - protein, 451 aa, Artificial Sequence; identical to SEQ ID NO: 16221
  Description of Artificial Sequence: Synthetic polypeptide
  XENP018425 1G6_H1_L1.78_IgG1_PVA_/S267K Heavy Chain

SEQ ID NO: 19552 - protein, 122 aa, Artificial Sequence; identical to SEQ ID NO: 10922
  Description of Artificial Sequence: Synthetic polypeptide
  VH of XENP018425

SEQ ID NO: 19553 - protein, 5 aa, Artificial Sequence
  Description of Artificial Sequence: Synthetic peptide
  XENP018425 vhCDR1
NYWMN

SEQ ID NO: 19554 - protein, 19 aa, Artificial Sequence
  Description of Artificial Sequence: Synthetic peptide
  XENP018425 vhCDR2
EIRLKSNNYATHYAEPVKG

SEQ ID NO: 19555 - protein, 11 aa, Artificial Sequence
  Description of Artificial Sequence: Synthetic peptide
  XENP018425 vhCDR3
YYGNYGGYFDV

SEQ ID NO: 19556 - protein, 214 aa, Artificial Sequence
  Description of Artificial Sequence: Synthetic polypeptide
  XENP018425 1G6_H1_L1.78_IgG1_PVA_/S267K Light Chain
SIVMTQSPATLSVSPGERATLSCRASQSVSNDVAWYQQKPGQSPRLLINYASHRLTGVPDRFTGSGYGTEFTLTISSLQSEDFAVYFCQQDYSSPRTFGGGTKVEIKRTVAAPSVFIFPPSDEQLKSGTASVVCLLNNFYPREAKVQWKVDNALQSGNSQESVTEQDSKDSTYSLSSTLTLSKADYEKHKVYACEVTHQGLSSPVTKSFNRGEC

SEQ ID NO: 19557 - protein, 107 aa, Artificial Sequence; identical to SEQ ID NO: 13872
  Description of Artificial Sequence: Synthetic polypeptide
  VL of XENP018425

SEQ ID NO: 19558 - protein, 11 aa, Artificial Sequence
  Description of Artificial Sequence: Synthetic peptide
  XENP018425 vlCDR1
RASQSVSNDVA

SEQ ID NO: 19559 - protein, 7 aa, Artificial Sequence
  Description of Artificial Sequence: Synthetic peptide
  XENP018425 vlCDR2
YASHRLT

SEQ ID NO: 19560 - protein, 9 aa, Artificial Sequence
  Description of Artificial Sequence: Synthetic peptide
  XENP018425 vlCDR3
QQDYSSPRT

SEQ ID NO: 19561 - protein, 451 aa, Artificial Sequence; identical to SEQ ID NO: 16221
  Description of Artificial Sequence: Synthetic polypeptide
  XENP018426 1G6_H1_L1.79_IgG1_PVA_/S267K Heavy Chain

SEQ ID NO: 19562 - protein, 122 aa, Artificial Sequence; identical to SEQ ID NO: 10922
  Description of Artificial Sequence: Synthetic polypeptide
  VH of XENP018426

SEQ ID NO: 19563 - protein, 5 aa, Artificial Sequence
  Description of Artificial Sequence: Synthetic peptide
  XENP018426 vhCDR1
NYWMN

SEQ ID NO: 19564 - protein, 19 aa, Artificial Sequence
  Description of Artificial Sequence: Synthetic peptide
  XENP018426 vhCDR2
EIRLKSNNYATHYAEPVKG

SEQ ID NO: 19565 - protein, 11 aa, Artificial Sequence
  Description of Artificial Sequence: Synthetic peptide
  XENP018426 vhCDR3
YYGNYGGYFDV

SEQ ID NO: 19566 - protein, 214 aa, Artificial Sequence
  Description of Artificial Sequence: Synthetic polypeptide
  XENP018426 1G6_H1_L1.79_IgG1_PVA_/S267K Light Chain
SIVMTQSPATLSVSPGERATLSCRASQSVSNDVAWYQQKPGQSPRLLINYASHRWTGVPDRFTGSGYGTEFTLTISSLQSEDFAVYFCQQDYSSPRTFGGGTKVEIKRTVAAPSVFIFPPSDEQLKSGTASVVCLLNNFYPREAKVQWKVDNALQSGNSQESVTEQDSKDSTYSLSSTLTLSKADYEKHKVYACEVTHQGLSSPVTKSFNRGEC

SEQ ID NO: 19567 - protein, 107 aa, Artificial Sequence; identical to SEQ ID NO: 13881
  Description of Artificial Sequence: Synthetic polypeptide
  VL of XENP018426

SEQ ID NO: 19568 - protein, 11 aa, Artificial Sequence
  Description of Artificial Sequence: Synthetic peptide
  XENP018426 vlCDR1
RASQSVSNDVA

SEQ ID NO: 19569 - protein, 7 aa, Artificial Sequence
  Description of Artificial Sequence: Synthetic peptide
  XENP018426 vlCDR2
YASHRWT

SEQ ID NO: 19570 - protein, 9 aa, Artificial Sequence
  Description of Artificial Sequence: Synthetic peptide
  XENP018426 vlCDR3
QQDYSSPRT

SEQ ID NO: 19571 - protein, 451 aa, Artificial Sequence; identical to SEQ ID NO: 16221
  Description of Artificial Sequence: Synthetic polypeptide
  XENP018427 1G6_H1_L1.80_IgG1_PVA_/S267K Heavy Chain

SEQ ID NO: 19572 - protein, 122 aa, Artificial Sequence; identical to SEQ ID NO: 10922
  Description of Artificial Sequence: Synthetic polypeptide
  VH of XENP018427

SEQ ID NO: 19573 - protein, 5 aa, Artificial Sequence
  Description of Artificial Sequence: Synthetic peptide
  XENP018427 vhCDR1
NYWMN

SEQ ID NO: 19574 - protein, 19 aa, Artificial Sequence
  Description of Artificial Sequence: Synthetic peptide
  XENP018427 vhCDR2
EIRLKSNNYATHYAEPVKG

SEQ ID NO: 19575 - protein, 11 aa, Artificial Sequence
  Description of Artificial Sequence: Synthetic peptide
  XENP018427 vhCDR3
YYGNYGGYFDV

SEQ ID NO: 19576 - protein, 214 aa, Artificial Sequence
  Description of Artificial Sequence: Synthetic polypeptide
  XENP018427 1G6_H1_L1.80_IgG1_PVA_/S267K Light Chain
SIVMTQSPATLSVSPGERATLSCRASQSVSNDVAWYQQKPGQSPRLLINYASHRVTGVPDRFTGSGYGTEFTLTISSLQSEDFAVYFCQQDYSSPRTFGGGTKVEIKRTVAAPSVFIFPPSDEQLKSGTASVVCLLNNFYPREAKVQWKVDNALQSGNSQESVTEQDSKDSTYSLSSTLTLSKADYEKHKVYACEVTHQGLSSPVTKSFNRGEC

SEQ ID NO: 19577 - protein, 107 aa, Artificial Sequence; identical to SEQ ID NO: 13890
  Description of Artificial Sequence: Synthetic polypeptide
  VL of XENP018427

SEQ ID NO: 19578 - protein, 11 aa, Artificial Sequence
  Description of Artificial Sequence: Synthetic peptide
  XENP018427 vlCDR1
RASQSVSNDVA

SEQ ID NO: 19579 - protein, 7 aa, Artificial Sequence
  Description of Artificial Sequence: Synthetic peptide
  XENP018427 vlCDR2
YASHRVT

SEQ ID NO: 19580 - protein, 9 aa, Artificial Sequence
  Description of Artificial Sequence: Synthetic peptide
  XENP018427 vlCDR3
QQDYSSPRT

SEQ ID NO: 19581 - protein, 451 aa, Artificial Sequence; identical to SEQ ID NO: 16221
  Description of Artificial Sequence: Synthetic polypeptide
  XENP018428 1G6_H1_L1.81_IgG1_PVA_/S267K Heavy Chain

SEQ ID NO: 19582 - protein, 122 aa, Artificial Sequence; identical to SEQ ID NO: 10922
  Description of Artificial Sequence: Synthetic polypeptide
  VH of XENP018428

SEQ ID NO: 19583 - protein, 5 aa, Artificial Sequence
  Description of Artificial Sequence: Synthetic peptide
  XENP018428 vhCDR1
NYWMN

SEQ ID NO: 19584 - protein, 19 aa, Artificial Sequence
  Description of Artificial Sequence: Synthetic peptide
  XENP018428 vhCDR2
EIRLKSNNYATHYAEPVKG

SEQ ID NO: 19585 - protein, 11 aa, Artificial Sequence
  Description of Artificial Sequence: Synthetic peptide
  XENP018428 vhCDR3
YYGNYGGYFDV

SEQ ID NO: 19586 - protein, 214 aa, Artificial Sequence
  Description of Artificial Sequence: Synthetic polypeptide
  XENP018428 1G6_H1_L1.81_IgG1_PVA_/S267K Light Chain
SIVMTQSPATLSVSPGERATLSCRASQSVSNDVAWYQQKPGQSPRLLINYASHRATGVPDRFTGSGYGTEFTLTISSLQSEDFAVYFCQQDYSSPRTFGGGTKVEIKRTVAAPSVFIFPPSDEQLKSGTASVVCLLNNFYPREAKVQWKVDNALQSGNSQESVTEQDSKDSTYSLSSTLTLSKADYEKHKVYACEVTHQGLSSPVTKSFNRGEC

SEQ ID NO: 19587 - protein, 107 aa, Artificial Sequence; identical to SEQ ID NO: 13899
  Description of Artificial Sequence: Synthetic polypeptide
  VL of XENP018428

SEQ ID NO: 19588 - protein, 11 aa, Artificial Sequence
  Description of Artificial Sequence: Synthetic peptide
  XENP018428 vlCDR1
RASQSVSNDVA

SEQ ID NO: 19589 - protein, 7 aa, Artificial Sequence
  Description of Artificial Sequence: Synthetic peptide
  XENP018428 vlCDR2
YASHRAT

SEQ ID NO: 19590 - protein, 9 aa, Artificial Sequence
  Description of Artificial Sequence: Synthetic peptide
  XENP018428 vlCDR3
QQDYSSPRT

SEQ ID NO: 19591 - protein, 451 aa, Artificial Sequence; identical to SEQ ID NO: 16221
  Description of Artificial Sequence: Synthetic polypeptide
  XENP018429 1G6_H1_L1.82_IgG1_PVA_/S267K Heavy Chain

SEQ ID NO: 19592 - protein, 122 aa, Artificial Sequence; identical to SEQ ID NO: 10922
  Description of Artificial Sequence: Synthetic polypeptide
  VH of XENP018429

SEQ ID NO: 19593 - protein, 5 aa, Artificial Sequence
  Description of Artificial Sequence: Synthetic peptide
  XENP018429 vhCDR1
NYWMN

SEQ ID NO: 19594 - protein, 19 aa, Artificial Sequence
  Description of Artificial Sequence: Synthetic peptide
  XENP018429 vhCDR2
EIRLKSNNYATHYAEPVKG

SEQ ID NO: 19595 - protein, 11 aa, Artificial Sequence
  Description of Artificial Sequence: Synthetic peptide
  XENP018429 vhCDR3
YYGNYGGYFDV

SEQ ID NO: 19596 - protein, 214 aa, Artificial Sequence
  Description of Artificial Sequence: Synthetic polypeptide
  XENP018429 1G6_H1_L1.82_IgG1_PVA_/S267K Light Chain
SIVMTQSPATLSVSPGERATLSCRASQSVSNDVAWYQQKPGQSPRLLINYASHRQTGVPDRFTGSGYGTEFTLTISSLQSEDFAVYFCQQDYSSPRTFGGGTKVEIKRTVAAPSVFIFPPSDEQLKSGTASVVCLLNNFYPREAKVQWKVDNALQSGNSQESVTEQDSKDSTYSLSSTLTLSKADYEKHKVYACEVTHQGLSSPVTKSFNRGEC

SEQ ID NO: 19597 - protein, 107 aa, Artificial Sequence; identical to SEQ ID NO: 13908
  Description of Artificial Sequence: Synthetic polypeptide
  VL of XENP018429

SEQ ID NO: 19598 - protein, 11 aa, Artificial Sequence
  Description of Artificial Sequence: Synthetic peptide
  XENP018429 vlCDR1
RASQSVSNDVA

SEQ ID NO: 19599 - protein, 7 aa, Artificial Sequence
  Description of Artificial Sequence: Synthetic peptide
  XENP018429 vlCDR2
YASHRQT

SEQ ID NO: 19600 - protein, 9 aa, Artificial Sequence
  Description of Artificial Sequence: Synthetic peptide
  XENP018429 vlCDR3
QQDYSSPRT

SEQ ID NO: 19601 - protein, 451 aa, Artificial Sequence; identical to SEQ ID NO: 16221
  Description of Artificial Sequence: Synthetic polypeptide
  XENP018430 1G6_H1_L1.83_IgG1_PVA_/S267K Heavy Chain

SEQ ID NO: 19602 - protein, 122 aa, Artificial Sequence; identical to SEQ ID NO: 10922
  Description of Artificial Sequence: Synthetic polypeptide
  VH of XENP018430

SEQ ID NO: 19603 - protein, 5 aa, Artificial Sequence
  Description of Artificial Sequence: Synthetic peptide
  XENP018430 vhCDR1
NYWMN

SEQ ID NO: 19604 - protein, 19 aa, Artificial Sequence
  Description of Artificial Sequence: Synthetic peptide
  XENP018430 vhCDR2
EIRLKSNNYATHYAEPVKG

SEQ ID NO: 19605 - protein, 11 aa, Artificial Sequence
  Description of Artificial Sequence: Synthetic peptide
  XENP018430 vhCDR3
YYGNYGGYFDV

SEQ ID NO: 19606 - protein, 214 aa, Artificial Sequence
  Description of Artificial Sequence: Synthetic polypeptide
  XENP018430 1G6_H1_L1.83_IgG1_PVA_/S267K Light Chain
SIVMTQSPATLSVSPGERATLSCRASQSVSNDVAWYQQKPGQSPRLLINYASHRDTGVPDRFTGSGYGTEFTLTISSLQSEDFAVYFCQQDYSSPRTFGGGTKVEIKRTVAAPSVFIFPPSDEQLKSGTASVVCLLNNFYPREAKVQWKVDNALQSGNSQESVTEQDSKDSTYSLSSTLTLSKADYEKHKVYACEVTHQGLSSPVTKSFNRGEC

SEQ ID NO: 19607 - protein, 107 aa, Artificial Sequence; identical to SEQ ID NO: 13917
  Description of Artificial Sequence: Synthetic polypeptide
  VL of XENP018430

SEQ ID NO: 19608 - protein, 11 aa, Artificial Sequence
  Description of Artificial Sequence: Synthetic peptide
  XENP018430 vlCDR1
RASQSVSNDVA

SEQ ID NO: 19609 - protein, 7 aa, Artificial Sequence
  Description of Artificial Sequence: Synthetic peptide
  XENP018430 vlCDR2
YASHRDT

SEQ ID NO: 19610 - protein, 9 aa, Artificial Sequence
  Description of Artificial Sequence: Synthetic peptide
  XENP018430 vlCDR3
QQDYSSPRT

SEQ ID NO: 19611 - protein, 451 aa, Artificial Sequence; identical to SEQ ID NO: 16221
  Description of Artificial Sequence: Synthetic polypeptide
  XENP018431 1G6_H1_L1.84_IgG1_PVA_/S267K Heavy Chain

SEQ ID NO: 19612 - protein, 122 aa, Artificial Sequence; identical to SEQ ID NO: 10922
  Description of Artificial Sequence: Synthetic polypeptide
  VH of XENP018431

SEQ ID NO: 19613 - protein, 5 aa, Artificial Sequence
  Description of Artificial Sequence: Synthetic peptide
  XENP018431 vhCDR1
NYWMN

SEQ ID NO: 19614 - protein, 19 aa, Artificial Sequence
  Description of Artificial Sequence: Synthetic peptide
  XENP018431 vhCDR2
EIRLKSNNYATHYAEPVKG

SEQ ID NO: 19615 - protein, 11 aa, Artificial Sequence
  Description of Artificial Sequence: Synthetic peptide
  XENP018431 vhCDR3
YYGNYGGYFDV

SEQ ID NO: 19616 - protein, 214 aa, Artificial Sequence
  Description of Artificial Sequence: Synthetic polypeptide
  XENP018431 1G6_H1_L1.84_IgG1_PVA_/S267K Light Chain
SIVMTQSPATLSVSPGERATLSCRASQSVSNDVAWYQQKPGQSPRLLINYASHRKTGVPDRFTGSGYGTEFTLTISSLQSEDFAVYFCQQDYSSPRTFGGGTKVEIKRTVAAPSVFIFPPSDEQLKSGTASVVCLLNNFYPREAKVQWKVDNALQSGNSQESVTEQDSKDSTYSLSSTLTLSKADYEKHKVYACEVTHQGLSSPVTKSFNRGEC

SEQ ID NO: 19617 - protein, 107 aa, Artificial Sequence; identical to SEQ ID NO: 13926
  Description of Artificial Sequence: Synthetic polypeptide
  VL of XENP018431

SEQ ID NO: 19618 - protein, 11 aa, Artificial Sequence
  Description of Artificial Sequence: Synthetic peptide
  XENP018431 vlCDR1
RASQSVSNDVA

SEQ ID NO: 19619 - protein, 7 aa, Artificial Sequence
  Description of Artificial Sequence: Synthetic peptide
  XENP018431 vlCDR2
YASHRKT

SEQ ID NO: 19620 - protein, 9 aa, Artificial Sequence
  Description of Artificial Sequence: Synthetic peptide
  XENP018431 vlCDR3
QQDYSSPRT

SEQ ID NO: 19621 - protein, 451 aa, Artificial Sequence; identical to SEQ ID NO: 16221
  Description of Artificial Sequence: Synthetic polypeptide
  XENP018432 1G6_H1_L1.85_IgG1_PVA_/S267K Heavy Chain

SEQ ID NO: 19622 - protein, 122 aa, Artificial Sequence; identical to SEQ ID NO: 10922
  Description of Artificial Sequence: Synthetic polypeptide
  VH of XENP018432

SEQ ID NO: 19623 - protein, 5 aa, Artificial Sequence
  Description of Artificial Sequence: Synthetic peptide
  XENP018432 vhCDR1
NYWMN

SEQ ID NO: 19624 - protein, 19 aa, Artificial Sequence
  Description of Artificial Sequence: Synthetic peptide
  XENP018432 vhCDR2
EIRLKSNNYATHYAEPVKG

SEQ ID NO: 19625 - protein, 11 aa, Artificial Sequence
  Description of Artificial Sequence: Synthetic peptide
  XENP018432 vhCDR3
YYGNYGGYFDV

SEQ ID NO: 19626 - protein, 214 aa, Artificial Sequence
  Description of Artificial Sequence: Synthetic polypeptide
  XENP018432 1G6_H1_L1.85_IgG1_PVA_/S267K Light Chain
SIVMTQSPATLSVSPGERATLSCRASQSVSNDVAWYQQKPGQSPRLLINYASHRYVGVPDRFTGSGYGTEFTLTISSLQSEDFAVYFCQQDYSSPRTFGGGTKVEIKRTVAAPSVFIFPPSDEQLKSGTASVVCLLNNFYPREAKVQWKVDNALQSGNSQESVTEQDSKDSTYSLSSTLTLSKADYEKHKVYACEVTHQGLSSPVTKSFNRGEC

SEQ ID NO: 19627 - protein, 107 aa, Artificial Sequence; identical to SEQ ID NO: 13935
  Description of Artificial Sequence: Synthetic polypeptide
  VL of XENP018432

SEQ ID NO: 19628 - protein, 11 aa, Artificial Sequence
  Description of Artificial Sequence: Synthetic peptide
  XENP018432 vlCDR1
RASQSVSNDVA

SEQ ID NO: 19629 - protein, 7 aa, Artificial Sequence
  Description of Artificial Sequence: Synthetic peptide
  XENP018432 vlCDR2
YASHRYV

SEQ ID NO: 19630 - protein, 9 aa, Artificial Sequence
  Description of Artificial Sequence: Synthetic peptide
  XENP018432 vlCDR3
QQDYSSPRT

SEQ ID NO: 19631 - protein, 451 aa, Artificial Sequence; identical to SEQ ID NO: 16221
  Description of Artificial Sequence: Synthetic polypeptide
  XENP018433 1G6_H1_L1.86_IgG1_PVA_/S267K Heavy Chain

SEQ ID NO: 19632 - protein, 122 aa, Artificial Sequence; identical to SEQ ID NO: 10922
  Description of Artificial Sequence: Synthetic polypeptide
  VH of XENP018433

SEQ ID NO: 19633 - protein, 5 aa, Artificial Sequence
  Description of Artificial Sequence: Synthetic peptide
  XENP018433 vhCDR1
NYWMN

SEQ ID NO: 19634 - protein, 19 aa, Artificial Sequence
  Description of Artificial Sequence: Synthetic peptide
  XENP018433 vhCDR2
EIRLKSNNYATHYAEPVKG

SEQ ID NO: 19635 - protein, 11 aa, Artificial Sequence
  Description of Artificial Sequence: Synthetic peptide
  XENP018433 vhCDR3
YYGNYGGYFDV

SEQ ID NO: 19636 - protein, 214 aa, Artificial Sequence
  Description of Artificial Sequence: Synthetic polypeptide
  XENP018433 1G6_H1_L1.86_IgG1_PVA_/S267K Light Chain
SIVMTQSPATLSVSPGERATLSCRASQSVSNDVAWYQQKPGQSPRLLINYASHRYSGVPDRFTGSGYGTEFTLTISSLQSEDFAVYFCQQDYSSPRTFGGGTKVEIKRTVAAPSVFIFPPSDEQLKSGTASVVCLLNNFYPREAKVQWKVDNALQSGNSQESVTEQDSKDSTYSLSSTLTLSKADYEKHKVYACEVTHQGLSSPVTKSFNRGEC

SEQ ID NO: 19637 - protein, 107 aa, Artificial Sequence; identical to SEQ ID NO: 13944
  Description of Artificial Sequence: Synthetic polypeptide
  VL of XENP018433

SEQ ID NO: 19638 - protein, 11 aa, Artificial Sequence
  Description of Artificial Sequence: Synthetic peptide
  XENP018433 vlCDR1
RASQSVSNDVA

SEQ ID NO: 19639 - protein, 7 aa, Artificial Sequence
  Description of Artificial Sequence: Synthetic peptide
  XENP018433 vlCDR2
YASHRYS

SEQ ID NO: 19640 - protein, 9 aa, Artificial Sequence
  Description of Artificial Sequence: Synthetic peptide
  XENP018433 vlCDR3
QQDYSSPRT

SEQ ID NO: 19641 - protein, 451 aa, Artificial Sequence; identical to SEQ ID NO: 16221
  Description of Artificial Sequence: Synthetic polypeptide
  XENP018434 1G6_H1_L1.87_IgG1_PVA_/S267K Heavy Chain

SEQ ID NO: 19642 - protein, 122 aa, Artificial Sequence; identical to SEQ ID NO: 10922
  Description of Artificial Sequence: Synthetic polypeptide
  VH of XENP018434

SEQ ID NO: 19643 - protein, 5 aa, Artificial Sequence
  Description of Artificial Sequence: Synthetic peptide
  XENP018434 vhCDR1
NYWMN

SEQ ID NO: 19644 - protein, 19 aa, Artificial Sequence
  Description of Artificial Sequence: Synthetic peptide
  XENP018434 vhCDR2
EIRLKSNNYATHYAEPVKG

SEQ ID NO: 19645 - protein, 11 aa, Artificial Sequence
  Description of Artificial Sequence: Synthetic peptide
  XENP018434 vhCDR3
YYGNYGGYFDV

SEQ ID NO: 19646 - protein, 214 aa, Artificial Sequence
  Description of Artificial Sequence: Synthetic polypeptide
  XENP018434 1G6_H1_L1.87_IgG1_PVA_/S267K Light Chain
SIVMTQSPATLSVSPGERATLSCRASQSVSNDVAWYQQKPGQSPRLLINYASHRYAGVPDRFTGSGYGTEFTLTISSLQSEDFAVYFCQQDYSSPRTFGGGTKVEIKRTVAAPSVFIFPPSDEQLKSGTASVVCLLNNFYPREAKVQWKVDNALQSGNSQESVTEQDSKDSTYSLSSTLTLSKADYEKHKVYACEVTHQGLSSPVTKSFNRGEC

SEQ ID NO: 19647 - protein, 107 aa, Artificial Sequence; identical to SEQ ID NO: 13953
  Description of Artificial Sequence: Synthetic polypeptide
  VL of XENP018434

SEQ ID NO: 19648 - protein, 11 aa, Artificial Sequence
  Description of Artificial Sequence: Synthetic peptide
  XENP018434 vlCDR1
RASQSVSNDVA

SEQ ID NO: 19649 - protein, 7 aa, Artificial Sequence
  Description of Artificial Sequence: Synthetic peptide
  XENP018434 vlCDR2
YASHRYA

SEQ ID NO: 19650 - protein, 9 aa, Artificial Sequence
  Description of Artificial Sequence: Synthetic peptide
  XENP018434 vlCDR3
QQDYSSPRT

SEQ ID NO: 19651 - protein, 451 aa, Artificial Sequence; identical to SEQ ID NO: 16221
  Description of Artificial Sequence: Synthetic polypeptide
  XENP018435 1G6_H1_L1.88_IgG1_PVA_/S267K Heavy Chain

SEQ ID NO: 19652 - protein, 122 aa, Artificial Sequence; identical to SEQ ID NO: 10922
  Description of Artificial Sequence: Synthetic polypeptide
  VH of XENP018435

SEQ ID NO: 19653 - protein, 5 aa, Artificial Sequence
  Description of Artificial Sequence: Synthetic peptide
  XENP018435 vhCDR1
NYWMN

SEQ ID NO: 19654 - protein, 19 aa, Artificial Sequence
  Description of Artificial Sequence: Synthetic peptide
  XENP018435 vhCDR2
EIRLKSNNYATHYAEPVKG

SEQ ID NO: 19655 - protein, 11 aa, Artificial Sequence
  Description of Artificial Sequence: Synthetic peptide
  XENP018435 vhCDR3
YYGNYGGYFDV

SEQ ID NO: 19656 - protein, 214 aa, Artificial Sequence
  Description of Artificial Sequence: Synthetic polypeptide
  XENP018435 1G6_H1_L1.88_IgG1_PVA_/S267K Light Chain
SIVMTQSPATLSVSPGERATLSCRASQSVSNDVAWYQQKPGQSPRLLINYASHRYIGVPDRFTGSGYGTEFTLTISSLQSEDFAVYFCQQDYSSPRTFGGGTKVEIKRTVAAPSVFIFPPSDEQLKSGTASVVCLLNNFYPREAKVQWKVDNALQSGNSQESVTEQDSKDSTYSLSSTLTLSKADYEKHKVYACEVTHQGLSSPVTKSFNRGEC

SEQ ID NO: 19657 - protein, 107 aa, Artificial Sequence; identical to SEQ ID NO: 13962
  Description of Artificial Sequence: Synthetic polypeptide
  VL of XENP018435

SEQ ID NO: 19658 - protein, 11 aa, Artificial Sequence
  Description of Artificial Sequence: Synthetic peptide
  XENP018435 vlCDR1
RASQSVSNDVA

SEQ ID NO: 19659 - protein, 7 aa, Artificial Sequence
  Description of Artificial Sequence: Synthetic peptide
  XENP018435 vlCDR2
YASHRYI

SEQ ID NO: 19660 - protein, 9 aa, Artificial Sequence
  Description of Artificial Sequence: Synthetic peptide
  XENP018435 vlCDR3
QQDYSSPRT

SEQ ID NO: 19661 - protein, 451 aa, Artificial Sequence; identical to SEQ ID NO: 16221
  Description of Artificial Sequence: Synthetic polypeptide
  XENP018436 1G6_H1_L1.89_IgG1_PVA_/S267K Heavy Chain

SEQ ID NO: 19662 - protein, 122 aa, Artificial Sequence; identical to SEQ ID NO: 10922
  Description of Artificial Sequence: Synthetic polypeptide
  VH of XENP018436

SEQ ID NO: 19663 - protein, 5 aa, Artificial Sequence
  Description of Artificial Sequence: Synthetic peptide
  XENP018436 vhCDR1
NYWMN

SEQ ID NO: 19664 - protein, 19 aa, Artificial Sequence
  Description of Artificial Sequence: Synthetic peptide
  XENP018436 vhCDR2
EIRLKSNNYATHYAEPVKG

SEQ ID NO: 19665 - protein, 11 aa, Artificial Sequence
  Description of Artificial Sequence: Synthetic peptide
  XENP018436 vhCDR3
YYGNYGGYFDV

SEQ ID NO: 19666 - protein, 214 aa, Artificial Sequence
  Description of Artificial Sequence: Synthetic polypeptide
  XENP018436 1G6_H1_L1.89_IgG1_PVA_/S267K Light Chain
SIVMTQSPATLSVSPGERATLSCRASQSVSNDVAWYQQKPGQSPRLLINYASHRYQGVPDRFTGSGYGTEFTLTISSLQSEDFAVYFCQQDYSSPRTFGGGTKVEIKRTVAAPSVFIFPPSDEQLKSGTASVVCLLNNFYPREAKVQWKVDNALQSGNSQESVTEQDSKDSTYSLSSTLTLSKADYEKHKVYACEVTHQGLSSPVTKSFNRGEC

SEQ ID NO: 19667 - protein, 107 aa, Artificial Sequence; identical to SEQ ID NO: 13971
  Description of Artificial Sequence: Synthetic polypeptide
  VL of XENP018436

SEQ ID NO: 19668 - protein, 11 aa, Artificial Sequence
  Description of Artificial Sequence: Synthetic peptide
  XENP018436 vlCDR1
RASQSVSNDVA

SEQ ID NO: 19669 - protein, 7 aa, Artificial Sequence
  Description of Artificial Sequence: Synthetic peptide
  XENP018436 vlCDR2
YASHRYQ

SEQ ID NO: 19670 - protein, 9 aa, Artificial Sequence
  Description of Artificial Sequence: Synthetic peptide
  XENP018436 vlCDR3
QQDYSSPRT

SEQ ID NO: 19671 - protein, 451 aa, Artificial Sequence; identical to SEQ ID NO: 16221
  Description of Artificial Sequence: Synthetic polypeptide
  XENP018437 1G6_H1_L1.90_IgG1_PVA_/S267K Heavy Chain

SEQ ID NO: 19672 - protein, 122 aa, Artificial Sequence; identical to SEQ ID NO: 10922
  Description of Artificial Sequence: Synthetic polypeptide
  VH of XENP018437

SEQ ID NO: 19673 - protein, 5 aa, Artificial Sequence
  Description of Artificial Sequence: Synthetic peptide
  XENP018437 vhCDR1
NYWMN

SEQ ID NO: 19674 - protein, 19 aa, Artificial Sequence
  Description of Artificial Sequence: Synthetic peptide
  XENP018437 vhCDR2
EIRLKSNNYATHYAEPVKG

SEQ ID NO: 19675 - protein, 11 aa, Artificial Sequence
  Description of Artificial Sequence: Synthetic peptide
  XENP018437 vhCDR3
YYGNYGGYFDV

SEQ ID NO: 19676 - protein, 214 aa, Artificial Sequence
  Description of Artificial Sequence: Synthetic polypeptide
  XENP018437 1G6_H1_L1.90_IgG1_PVA_/S267K Light Chain
SIVMTQSPATLSVSPGERATLSCRASQSVSNDVAWYQQKPGQSPRLLINYASHRYHGVPDRFTGSGYGTEFTLTISSLQSEDFAVYFCQQDYSSPRTFGGGTKVEIKRTVAAPSVFIFPPSDEQLKSGTASVVCLLNNFYPREAKVQWKVDNALQSGNSQESVTEQDSKDSTYSLSSTLTLSKADYEKHKVYACEVTHQGLSSPVTKSFNRGEC

SEQ ID NO: 19677 - protein, 107 aa, Artificial Sequence; identical to SEQ ID NO: 13980
  Description of Artificial Sequence: Synthetic polypeptide
  VL of XENP018437

SEQ ID NO: 19678 - protein, 11 aa, Artificial Sequence
  Description of Artificial Sequence: Synthetic peptide
  XENP018437 vlCDR1
RASQSVSNDVA

SEQ ID NO: 19679 - protein, 7 aa, Artificial Sequence
  Description of Artificial Sequence: Synthetic peptide
  XENP018437 vlCDR2
YASHRYH

SEQ ID NO: 19680 - protein, 9 aa, Artificial Sequence
  Description of Artificial Sequence: Synthetic peptide
  XENP018437 vlCDR3
QQDYSSPRT

SEQ ID NO: 19681 - protein, 451 aa, Artificial Sequence; identical to SEQ ID NO: 16221
  Description of Artificial Sequence: Synthetic polypeptide
  XENP018438 1G6_H1_L1.91_IgG1_PVA_/S267K Heavy Chain

SEQ ID NO: 19682 - protein, 122 aa, Artificial Sequence; identical to SEQ ID NO: 10922
  Description of Artificial Sequence: Synthetic polypeptide
  VH of XENP018438

SEQ ID NO: 19683 - protein, 5 aa, Artificial Sequence
  Description of Artificial Sequence: Synthetic peptide
  XENP018438 vhCDR1
NYWMN

SEQ ID NO: 19684 - protein, 19 aa, Artificial Sequence
  Description of Artificial Sequence: Synthetic peptide
  XENP018438 vhCDR2
EIRLKSNNYATHYAEPVKG

SEQ ID NO: 19685 - protein, 11 aa, Artificial Sequence
  Description of Artificial Sequence: Synthetic peptide
  XENP018438 vhCDR3
YYGNYGGYFDV

SEQ ID NO: 19686 - protein, 214 aa, Artificial Sequence
  Description of Artificial Sequence: Synthetic polypeptide
  XENP018438 1G6_H1_L1.91_IgG1_PVA_/S267K Light Chain
SIVMTQSPATLSVSPGERATLSCRASQSVSNDVAWYQQKPGQSPRLLINYASHRYDGVPDRFTGSGYGTEFTLTISSLQSEDFAVYFCQQDYSSPRTFGGGTKVEIKRTVAAPSVFIFPPSDEQLKSGTASVVCLLNNFYPREAKVQWKVDNALQSGNSQESVTEQDSKDSTYSLSSTLTLSKADYEKHKVYACEVTHQGLSSPVTKSFNRGEC

SEQ ID NO: 19687 - protein, 107 aa, Artificial Sequence; identical to SEQ ID NO: 13989
  Description of Artificial Sequence: Synthetic polypeptide
  VL of XENP018438

SEQ ID NO: 19688 - protein, 11 aa, Artificial Sequence
  Description of Artificial Sequence: Synthetic peptide
  XENP018438 vlCDR1
RASQSVSNDVA

SEQ ID NO: 19689 - protein, 7 aa, Artificial Sequence
  Description of Artificial Sequence: Synthetic peptide
  XENP018438 vlCDR2
YASHRYD

SEQ ID NO: 19690 - protein, 9 aa, Artificial Sequence
  Description of Artificial Sequence: Synthetic peptide
  XENP018438 vlCDR3
QQDYSSPRT

SEQ ID NO: 19691 - protein, 451 aa, Artificial Sequence; identical to SEQ ID NO: 16221
  Description of Artificial Sequence: Synthetic polypeptide
  XENP018439 1G6_H1_L1.92_IgG1_PVA_/S267K Heavy Chain

SEQ ID NO: 19692 - protein, 122 aa, Artificial Sequence; identical to SEQ ID NO: 10922
  Description of Artificial Sequence: Synthetic polypeptide
  VH of XENP018439

SEQ ID NO: 19693 - protein, 5 aa, Artificial Sequence
  Description of Artificial Sequence: Synthetic peptide
  XENP018439 vhCDR1
NYWMN

SEQ ID NO: 19694 - protein, 19 aa, Artificial Sequence
  Description of Artificial Sequence: Synthetic peptide
  XENP018439 vhCDR2
EIRLKSNNYATHYAEPVKG

SEQ ID NO: 19695 - protein, 11 aa, Artificial Sequence
  Description of Artificial Sequence: Synthetic peptide
  XENP018439 vhCDR3
YYGNYGGYFDV

SEQ ID NO: 19696 - protein, 214 aa, Artificial Sequence
  Description of Artificial Sequence: Synthetic polypeptide
  XENP018439 1G6_H1_L1.92_IgG1_PVA_/S267K Light Chain
SIVMTQSPATLSVSPGERATLSCRASQSVSNDVAWYQQKPGQSPRLLINYASHRYKGVPDRFTGSGYGTEFTLTISSLQSEDFAVYFCQQDYSSPRTFGGGTKVEIKRTVAAPSVFIFPPSDEQLKSGTASVVCLLNNFYPREAKVQWKVDNALQSGNSQESVTEQDSKDSTYSLSSTLTLSKADYEKHKVYACEVTHQGLSSPVTKSFNRGEC

SEQ ID NO: 19697 - protein, 107 aa, Artificial Sequence; identical to SEQ ID NO: 13998
  Description of Artificial Sequence: Synthetic polypeptide
  VL of XENP018439

SEQ ID NO: 19698 - protein, 11 aa, Artificial Sequence
  Description of Artificial Sequence: Synthetic peptide
  XENP018439 vlCDR1
RASQSVSNDVA

SEQ ID NO: 19699 - protein, 7 aa, Artificial Sequence
  Description of Artificial Sequence: Synthetic peptide
  XENP018439 vlCDR2
YASHRYK

SEQ ID NO: 19700 - protein, 9 aa, Artificial Sequence
  Description of Artificial Sequence: Synthetic peptide
  XENP018439 vlCDR3
QQDYSSPRT

SEQ ID NO: 19701 - protein, 451 aa, Artificial Sequence; identical to SEQ ID NO: 16221
  Description of Artificial Sequence: Synthetic polypeptide
  XENP018440 1G6_H1_L1.93_IgG1_PVA_/S267K Heavy Chain

SEQ ID NO: 19702 - protein, 122 aa, Artificial Sequence; identical to SEQ ID NO: 10922
  Description of Artificial Sequence: Synthetic polypeptide
  VH of XENP018440

SEQ ID NO: 19703 - protein, 5 aa, Artificial Sequence
  Description of Artificial Sequence: Synthetic peptide
  XENP018440 vhCDR1
NYWMN

SEQ ID NO: 19704 - protein, 19 aa, Artificial Sequence
  Description of Artificial Sequence: Synthetic peptide
  XENP018440 vhCDR2
EIRLKSNNYATHYAEPVKG

SEQ ID NO: 19705 - protein, 11 aa, Artificial Sequence
  Description of Artificial Sequence: Synthetic peptide
  XENP018440 vhCDR3
YYGNYGGYFDV

SEQ ID NO: 19706 - protein, 214 aa, Artificial Sequence
  Description of Artificial Sequence: Synthetic polypeptide
  XENP018440 1G6_H1_L1.93_IgG1_PVA_/S267K Light Chain
SIVMTQSPATLSVSPGERATLSCRASQSVSNDVAWYQQKPGQSPRLLINYASHRYYGVPDRFTGSGYGTEFTLTISSLQSEDFAVYFCQQDYSSPRTFGGGTKVEIKRTVAAPSVFIFPPSDEQLKSGTASVVCLLNNFYPREAKVQWKVDNALQSGNSQESVTEQDSKDSTYSLSSTLTLSKADYEKHKVYACEVTHQGLSSPVTKSFNRGEC

SEQ ID NO: 19707 - protein, 107 aa, Artificial Sequence; identical to SEQ ID NO: 14007
  Description of Artificial Sequence: Synthetic polypeptide
  VL of XENP018440

SEQ ID NO: 19708 - protein, 11 aa, Artificial Sequence
  Description of Artificial Sequence: Synthetic peptide
  XENP018440 vlCDR1
RASQSVSNDVA

SEQ ID NO: 19709 - protein, 7 aa, Artificial Sequence
  Description of Artificial Sequence: Synthetic peptide
  XENP018440 vlCDR2
YASHRYY

SEQ ID NO: 19710 - protein, 9 aa, Artificial Sequence
  Description of Artificial Sequence: Synthetic peptide
  XENP018440 vlCDR3
QQDYSSPRT

SEQ ID NO: 19711 - protein, 451 aa, Artificial Sequence; identical to SEQ ID NO: 16221
  Description of Artificial Sequence: Synthetic polypeptide
  XENP018441 1G6_H1_L1.94_IgG1_PVA_/S267K Heavy Chain

SEQ ID NO: 19712 - protein, 122 aa, Artificial Sequence; identical to SEQ ID NO: 10922
  Description of Artificial Sequence: Synthetic polypeptide
  VH of XENP018441

SEQ ID NO: 19713 - protein, 5 aa, Artificial Sequence
  Description of Artificial Sequence: Synthetic peptide
  XENP018441 vhCDR1
NYWMN

SEQ ID NO: 19714 - protein, 19 aa, Artificial Sequence
  Description of Artificial Sequence: Synthetic peptide
  XENP018441 vhCDR2
EIRLKSNNYATHYAEPVKG

SEQ ID NO: 19715 - protein, 11 aa, Artificial Sequence
  Description of Artificial Sequence: Synthetic peptide
  XENP018441 vhCDR3
YYGNYGGYFDV

SEQ ID NO: 19716 - protein, 214 aa, Artificial Sequence
  Description of Artificial Sequence: Synthetic polypeptide
  XENP018441 1G6_H1_L1.94_IgG1_PVA_/S267K Light Chain
SIVMTQSPATLSVSPGERATLSCRASQSVSNDVAWYQQKPGQSPRLLINYASHRYTSVPDRFTGSGYGTEFTLTISSLQSEDFAVYFCQQDYSSPRTFGGGTKVEIKRTVAAPSVFIFPPSDEQLKSGTASVVCLLNNFYPREAKVQWKVDNALQSGNSQESVTEQDSKDSTYSLSSTLTLSKADYEKHKVYACEVTHQGLSSPVTKSFNRGEC

SEQ ID NO: 19717 - protein, 107 aa, Artificial Sequence; identical to SEQ ID NO: 14016
  Description of Artificial Sequence: Synthetic polypeptide
  VL of XENP018441

SEQ ID NO: 19718 - protein, 11 aa, Artificial Sequence
  Description of Artificial Sequence: Synthetic peptide
  XENP018441 vlCDR1
RASQSVSNDVA

SEQ ID NO: 19719 - protein, 7 aa, Artificial Sequence
  Description of Artificial Sequence: Synthetic peptide
  XENP018441 vlCDR2
YASHRYT

SEQ ID NO: 19720 - protein, 9 aa, Artificial Sequence
  Description of Artificial Sequence: Synthetic peptide
  XENP018441 vlCDR3
QQDYSSPRT

SEQ ID NO: 19721 - protein, 451 aa, Artificial Sequence; identical to SEQ ID NO: 16221
  Description of Artificial Sequence: Synthetic polypeptide
  XENP018442 1G6_H1_L1.95_IgG1_PVA_/S267K Heavy Chain

SEQ ID NO: 19722 - protein, 122 aa, Artificial Sequence; identical to SEQ ID NO: 10922
  Description of Artificial Sequence: Synthetic polypeptide
  VH of XENP018442

SEQ ID NO: 19723 - protein, 5 aa, Artificial Sequence
  Description of Artificial Sequence: Synthetic peptide
  XENP018442 vhCDR1
NYWMN

SEQ ID NO: 19724 - protein, 19 aa, Artificial Sequence
  Description of Artificial Sequence: Synthetic peptide
  XENP018442 vhCDR2
EIRLKSNNYATHYAEPVKG

SEQ ID NO: 19725 - protein, 11 aa, Artificial Sequence
  Description of Artificial Sequence: Synthetic peptide
  XENP018442 vhCDR3
YYGNYGGYFDV

SEQ ID NO: 19726 - protein, 214 aa, Artificial Sequence
  Description of Artificial Sequence: Synthetic polypeptide
  XENP018442 1G6_H1_L1.95_IgG1_PVA_/S267K Light Chain
SIVMTQSPATLSVSPGERATLSCRASQSVSNDVAWYQQKPGQSPRLLINYASHRYTGIPDRFTGSGYGTEFTLTISSLQSEDFAVYFCQQDYSSPRTFGGGTKVEIKRTVAAPSVFIFPPSDEQLKSGTASVVCLLNNFYPREAKVQWKVDNALQSGNSQESVTEQDSKDSTYSLSSTLTLSKADYEKHKVYACEVTHQGLSSPVTKSFNRGEC

SEQ ID NO: 19727 - protein, 107 aa, Artificial Sequence; identical to SEQ ID NO: 14025
  Description of Artificial Sequence: Synthetic polypeptide
  VL of XENP018442

SEQ ID NO: 19728 - protein, 11 aa, Artificial Sequence
  Description of Artificial Sequence: Synthetic peptide
  XENP018442 vlCDR1
RASQSVSNDVA

SEQ ID NO: 19729 - protein, 7 aa, Artificial Sequence
  Description of Artificial Sequence: Synthetic peptide
  XENP018442 vlCDR2
YASHRYT

SEQ ID NO: 19730 - protein, 9 aa, Artificial Sequence
  Description of Artificial Sequence: Synthetic peptide
  XENP018442 vlCDR3
QQDYSSPRT

SEQ ID NO: 19731 - protein, 451 aa, Artificial Sequence; identical to SEQ ID NO: 16221
  Description of Artificial Sequence: Synthetic polypeptide
  XENP018443 1G6_H1_L1.96_IgG1_PVA_/S267K Heavy Chain

SEQ ID NO: 19732 - protein, 122 aa, Artificial Sequence; identical to SEQ ID NO: 10922
  Description of Artificial Sequence: Synthetic polypeptide
  VH of XENP018443

SEQ ID NO: 19733 - protein, 5 aa, Artificial Sequence
  Description of Artificial Sequence: Synthetic peptide
  XENP018443 vhCDR1
NYWMN

SEQ ID NO: 19734 - protein, 19 aa, Artificial Sequence
  Description of Artificial Sequence: Synthetic peptide
  XENP018443 vhCDR2
EIRLKSNNYATHYAEPVKG

SEQ ID NO: 19735 - protein, 11 aa, Artificial Sequence
  Description of Artificial Sequence: Synthetic peptide
  XENP018443 vhCDR3
YYGNYGGYFDV

SEQ ID NO: 19736 - protein, 214 aa, Artificial Sequence
  Description of Artificial Sequence: Synthetic polypeptide
  XENP018443 1G6_H1_L1.96_IgG1_PVA_/S267K Light Chain
SIVMTQSPATLSVSPGERATLSCRASQSVSNDVAWYQQKPGQSPRLLINYASHRYTGVPARFTGSGYGTEFTLTISSLQSEDFAVYFCQQDYSSPRTFGGGTKVEIKRTVAAPSVFIFPPSDEQLKSGTASVVCLLNNFYPREAKVQWKVDNALQSGNSQESVTEQDSKDSTYSLSSTLTLSKADYEKHKVYACEVTHQGLSSPVTKSFNRGEC

SEQ ID NO: 19737 - protein, 107 aa, Artificial Sequence; identical to SEQ ID NO: 14034
  Description of Artificial Sequence: Synthetic polypeptide
  VL of XENP018443

SEQ ID NO: 19738 - protein, 11 aa, Artificial Sequence
  Description of Artificial Sequence: Synthetic peptide
  XENP018443 vlCDR1
RASQSVSNDVA

SEQ ID NO: 19739 - protein, 7 aa, Artificial Sequence
  Description of Artificial Sequence: Synthetic peptide
  XENP018443 vlCDR2
YASHRYT

SEQ ID NO: 19740 - protein, 9 aa, Artificial Sequence
  Description of Artificial Sequence: Synthetic peptide
  XENP018443 vlCDR3
QQDYSSPRT

SEQ ID NO: 19741 - protein, 451 aa, Artificial Sequence; identical to SEQ ID NO: 16221
  Description of Artificial Sequence: Synthetic polypeptide
  XENP018444 1G6_H1_L1.97_IgG1_PVA_/S267K Heavy Chain

SEQ ID NO: 19742 - protein, 122 aa, Artificial Sequence; identical to SEQ ID NO: 10922
  Description of Artificial Sequence: Synthetic polypeptide
  VH of XENP018444

SEQ ID NO: 19743 - protein, 5 aa, Artificial Sequence
  Description of Artificial Sequence: Synthetic peptide
  XENP018444 vhCDR1
NYWMN

SEQ ID NO: 19744 - protein, 19 aa, Artificial Sequence
  Description of Artificial Sequence: Synthetic peptide
  XENP018444 vhCDR2
EIRLKSNNYATHYAEPVKG

SEQ ID NO: 19745 - protein, 11 aa, Artificial Sequence
  Description of Artificial Sequence: Synthetic peptide
  XENP018444 vhCDR3
YYGNYGGYFDV

SEQ ID NO: 19746 - protein, 214 aa, Artificial Sequence
  Description of Artificial Sequence: Synthetic polypeptide
  XENP018444 1G6_H1_L1.97_IgG1_PVA_/S267K Light Chain
SIVMTQSPATLSVSPGERATLSCRASQSVSNDVAWYQQKPGQSPRLLINYASHRYTGVPDRFSGSGYGTEFTLTISSLQSEDFAVYFCQQDYSSPRTFGGGTKVEIKRTVAAPSVFIFPPSDEQLKSGTASVVCLLNNFYPREAKVQWKVDNALQSGNSQESVTEQDSKDSTYSLSSTLTLSKADYEKHKVYACEVTHQGLSSPVTKSFNRGEC

SEQ ID NO: 19747 - protein, 107 aa, Artificial Sequence; identical to SEQ ID NO: 14043
  Description of Artificial Sequence: Synthetic polypeptide
  VL of XENP018444

SEQ ID NO: 19748 - protein, 11 aa, Artificial Sequence
  Description of Artificial Sequence: Synthetic peptide
  XENP018444 vlCDR1
RASQSVSNDVA

SEQ ID NO: 19749 - protein, 7 aa, Artificial Sequence
  Description of Artificial Sequence: Synthetic peptide
  XENP018444 vlCDR2
YASHRYT

SEQ ID NO: 19750 - protein, 9 aa, Artificial Sequence
  Description of Artificial Sequence: Synthetic peptide
  XENP018444 vlCDR3
QQDYSSPRT

SEQ ID NO: 19751 - protein, 451 aa, Artificial Sequence; identical to SEQ ID NO: 16221
  Description of Artificial Sequence: Synthetic polypeptide
  XENP018445 1G6_H1_L1.98_IgG1_PVA_/S267K Heavy Chain

SEQ ID NO: 19752 - protein, 122 aa, Artificial Sequence; identical to SEQ ID NO: 10922
  Description of Artificial Sequence: Synthetic polypeptide
  VH of XENP018445

SEQ ID NO: 19753 - protein, 5 aa, Artificial Sequence
  Description of Artificial Sequence: Synthetic peptide
  XENP018445 vhCDR1
NYWMN

SEQ ID NO: 19754 - protein, 19 aa, Artificial Sequence
  Description of Artificial Sequence: Synthetic peptide
  XENP018445 vhCDR2
EIRLKSNNYATHYAEPVKG

SEQ ID NO: 19755 - protein, 11 aa, Artificial Sequence
  Description of Artificial Sequence: Synthetic peptide
  XENP018445 vhCDR3
YYGNYGGYFDV

SEQ ID NO: 19756 - protein, 214 aa, Artificial Sequence
  Description of Artificial Sequence: Synthetic polypeptide
  XENP018445 1G6_H1_L1.98_IgG1_PVA_/S267K Light Chain
SIVMTQSPATLSVSPGERATLSCRASQSVSNDVAWYQQKPGQSPRLLINYASHRYTGVPDRFTGSGSGTEFTLTISSLQSEDFAVYFCQQDYSSPRTFGGGTKVEIKRTVAAPSVFIFPPSDEQLKSGTASVVCLLNNFYPREAKVQWKVDNALQSGNSQESVTEQDSKDSTYSLSSTLTLSKADYEKHKVYACEVTHQGLSSPVTKSFNRGEC

SEQ ID NO: 19757 - protein, 107 aa, Artificial Sequence; identical to SEQ ID NO: 14052
  Description of Artificial Sequence: Synthetic polypeptide
  VL of XENP018445

SEQ ID NO: 19758 - protein, 11 aa, Artificial Sequence
  Description of Artificial Sequence: Synthetic peptide
  XENP018445 vlCDR1
RASQSVSNDVA

SEQ ID NO: 19759 - protein, 7 aa, Artificial Sequence
  Description of Artificial Sequence: Synthetic peptide
  XENP018445 vlCDR2
YASHRYT

SEQ ID NO: 19760 - protein, 9 aa, Artificial Sequence
  Description of Artificial Sequence: Synthetic peptide
  XENP018445 vlCDR3
QQDYSSPRT

SEQ ID NO: 19761 - protein, 451 aa, Artificial Sequence; identical to SEQ ID NO: 16221
  Description of Artificial Sequence: Synthetic polypeptide
  XENP018446 1G6_H1_L1.99_IgG1_PVA_/S267K Heavy Chain

SEQ ID NO: 19762 - protein, 122 aa, Artificial Sequence; identical to SEQ ID NO: 10922
  Description of Artificial Sequence: Synthetic polypeptide
  VH of XENP018446

SEQ ID NO: 19763 - protein, 5 aa, Artificial Sequence
  Description of Artificial Sequence: Synthetic peptide
  XENP018446 vhCDR1
NYWMN

SEQ ID NO: 19764 - protein, 19 aa, Artificial Sequence
  Description of Artificial Sequence: Synthetic peptide
  XENP018446 vhCDR2
EIRLKSNNYATHYAEPVKG

SEQ ID NO: 19765 - protein, 11 aa, Artificial Sequence
  Description of Artificial Sequence: Synthetic peptide
  XENP018446 vhCDR3
YYGNYGGYFDV

SEQ ID NO: 19766 - protein, 214 aa, Artificial Sequence
  Description of Artificial Sequence: Synthetic polypeptide
  XENP018446 1G6_H1_L1.99_IgG1_PVA_/S267K Light Chain
SIVMTQSPATLSVSPGERATLSCRASQSVSNDVAWYQQKPGQSPRLLINYASHRYTGVPDRFTGSGPGTEFTLTISSLQSEDFAVYFCQQDYSSPRTFGGGTKVEIKRTVAAPSVFIFPPSDEQLKSGTASVVCLLNNFYPREAKVQWKVDNALQSGNSQESVTEQDSKDSTYSLSSTLTLSKADYEKHKVYACEVTHQGLSSPVTKSFNRGEC

SEQ ID NO: 19767 - protein, 107 aa, Artificial Sequence; identical to SEQ ID NO: 14061
  Description of Artificial Sequence: Synthetic polypeptide
  VL of XENP018446

SEQ ID NO: 19768 - protein, 11 aa, Artificial Sequence
  Description of Artificial Sequence: Synthetic peptide
  XENP018446 vlCDR1
RASQSVSNDVA

SEQ ID NO: 19769 - protein, 7 aa, Artificial Sequence
  Description of Artificial Sequence: Synthetic peptide
  XENP018446 vlCDR2
YASHRYT

SEQ ID NO: 19770 - protein, 9 aa, Artificial Sequence
  Description of Artificial Sequence: Synthetic peptide
  XENP018446 vlCDR3
QQDYSSPRT

SEQ ID NO: 19771 - protein, 451 aa, Artificial Sequence; identical to SEQ ID NO: 16221
  Description of Artificial Sequence: Synthetic polypeptide
  XENP018447 1G6_H1_L1.100_IgG1_PVA_/S267K Heavy Chain

SEQ ID NO: 19772 - protein, 122 aa, Artificial Sequence; identical to SEQ ID NO: 10922
  Description of Artificial Sequence: Synthetic polypeptide
  VH of XENP018447

SEQ ID NO: 19773 - protein, 5 aa, Artificial Sequence
  Description of Artificial Sequence: Synthetic peptide
  XENP018447 vhCDR1
NYWMN

SEQ ID NO: 19774 - protein, 19 aa, Artificial Sequence
  Description of Artificial Sequence: Synthetic peptide
  XENP018447 vhCDR2
EIRLKSNNYATHYAEPVKG

SEQ ID NO: 19775 - protein, 11 aa, Artificial Sequence
  Description of Artificial Sequence: Synthetic peptide
  XENP018447 vhCDR3
YYGNYGGYFDV

SEQ ID NO: 19776 - protein, 214 aa, Artificial Sequence
  Description of Artificial Sequence: Synthetic polypeptide
  XENP018447 1G6_H1_L1.100_IgG1_PVA_/S267K Light Chain
SIVMTQSPATLSVSPGERATLSCRASQSVSNDVAWYQQKPGQSPRLLINYASHRYTGVPDRFTGSGYGTDFTLTISSLQSEDFAVYFCQQDYSSPRTFGGGTKVEIKRTVAAPSVFIFPPSDEQLKSGTASVVCLLNNFYPREAKVQWKVDNALQSGNSQESVTEQDSKDSTYSLSSTLTLSKADYEKHKVYACEVTHQGLSSPVTKSFNRGEC

SEQ ID NO: 19777 - protein, 107 aa, Artificial Sequence; identical to SEQ ID NO: 14070
  Description of Artificial Sequence: Synthetic polypeptide
  VL of XENP018447

SEQ ID NO: 19778 - protein, 11 aa, Artificial Sequence
  Description of Artificial Sequence: Synthetic peptide
  XENP018447 vlCDR1
RASQSVSNDVA

SEQ ID NO: 19779 - protein, 7 aa, Artificial Sequence
  Description of Artificial Sequence: Synthetic peptide
  XENP018447 vlCDR2
YASHRYT

SEQ ID NO: 19780 - protein, 9 aa, Artificial Sequence
  Description of Artificial Sequence: Synthetic peptide
  XENP018447 vlCDR3
QQDYSSPRT

SEQ ID NO: 19781 - protein, 451 aa, Artificial Sequence; identical to SEQ ID NO: 16221
  Description of Artificial Sequence: Synthetic polypeptide
  XENP018448 1G6_H1_L1.101_IgG1_PVA_/S267K Heavy Chain

SEQ ID NO: 19782 - protein, 122 aa, Artificial Sequence; identical to SEQ ID NO: 10922
  Description of Artificial Sequence: Synthetic polypeptide
  VH of XENP018448

SEQ ID NO: 19783 - protein, 5 aa, Artificial Sequence
  Description of Artificial Sequence: Synthetic peptide
  XENP018448 vhCDR1
NYWMN

SEQ ID NO: 19784 - protein, 19 aa, Artificial Sequence
  Description of Artificial Sequence: Synthetic peptide
  XENP018448 vhCDR2
EIRLKSNNYATHYAEPVKG

SEQ ID NO: 19785 - protein, 11 aa, Artificial Sequence
  Description of Artificial Sequence: Synthetic peptide
  XENP018448 vhCDR3
YYGNYGGYFDV

SEQ ID NO: 19786 - protein, 214 aa, Artificial Sequence
  Description of Artificial Sequence: Synthetic polypeptide
  XENP018448 1G6_H1_L1.101_IgG1_PVA_/S267K Light Chain
SIVMTQSPATLSVSPGERATLSCRASQSVSNDVAWYQQKPGQSPRLLINYASHRYTGVPDRFTGSGYGTEFTFTISSLQSEDFAVYFCQQDYSSPRTFGGGTKVEIKRTVAAPSVFIFPPSDEQLKSGTASVVCLLNNFYPREAKVQWKVDNALQSGNSQESVTEQDSKDSTYSLSSTLTLSKADYEKHKVYACEVTHQGLSSPVTKSFNRGEC

SEQ ID NO: 19787 - protein, 107 aa, Artificial Sequence; identical to SEQ ID NO: 14079
  Description of Artificial Sequence: Synthetic polypeptide
  VL of XENP018448

SEQ ID NO: 19788 - protein, 11 aa, Artificial Sequence
  Description of Artificial Sequence: Synthetic peptide
  XENP018448 vlCDR1
RASQSVSNDVA

SEQ ID NO: 19789 - protein, 7 aa, Artificial Sequence
  Description of Artificial Sequence: Synthetic peptide
  XENP018448 vlCDR2
YASHRYT

SEQ ID NO: 19790 - protein, 9 aa, Artificial Sequence
  Description of Artificial Sequence: Synthetic peptide
  XENP018448 vlCDR3
QQDYSSPRT

SEQ ID NO: 19791 - protein, 451 aa, Artificial Sequence; identical to SEQ ID NO: 16221
  Description of Artificial Sequence: Synthetic polypeptide
  XENP018449 1G6_H1_L1.102_IgG1_PVA_/S267K Heavy Chain

SEQ ID NO: 19792 - protein, 122 aa, Artificial Sequence; identical to SEQ ID NO: 10922
  Description of Artificial Sequence: Synthetic polypeptide
  VH of XENP018449

SEQ ID NO: 19793 - protein, 5 aa, Artificial Sequence
  Description of Artificial Sequence: Synthetic peptide
  XENP018449 vhCDR1
NYWMN

SEQ ID NO: 19794 - protein, 19 aa, Artificial Sequence
  Description of Artificial Sequence: Synthetic peptide
  XENP018449 vhCDR2
EIRLKSNNYATHYAEPVKG

SEQ ID NO: 19795 - protein, 11 aa, Artificial Sequence
  Description of Artificial Sequence: Synthetic peptide
  XENP018449 vhCDR3
YYGNYGGYFDV

SEQ ID NO: 19796 - protein, 214 aa, Artificial Sequence
  Description of Artificial Sequence: Synthetic polypeptide
  XENP018449 1G6_H1_L1.102_IgG1_PVA_/S267K Light Chain
SIVMTQSPATLSVSPGERATLSCRASQSVSNDVAWYQQKPGQSPRLLINYASHRYTGVPDRFTGSGYGTEFTLTISTLQSEDFAVYFCQQDYSSPRTFGGGTKVEIKRTVAAPSVFIFPPSDEQLKSGTASVVCLLNNFYPREAKVQWKVDNALQSGNSQESVTEQDSKDSTYSLSSTLTLSKADYEKHKVYACEVTHQGLSSPVTKSFNRGEC

SEQ ID NO: 19797 - protein, 107 aa, Artificial Sequence; identical to SEQ ID NO: 14088
  Description of Artificial Sequence: Synthetic polypeptide
  VL of XENP018449

SEQ ID NO: 19798 - protein, 11 aa, Artificial Sequence
  Description of Artificial Sequence: Synthetic peptide
  XENP018449 vlCDR1
RASQSVSNDVA

SEQ ID NO: 19799 - protein, 7 aa, Artificial Sequence
  Description of Artificial Sequence: Synthetic peptide
  XENP018449 vlCDR2
YASHRYT

SEQ ID NO: 19800 - protein, 9 aa, Artificial Sequence
  Description of Artificial Sequence: Synthetic peptide
  XENP018449 vlCDR3
QQDYSSPRT

SEQ ID NO: 19801 - protein, 451 aa, Artificial Sequence; identical to SEQ ID NO: 16221
  Description of Artificial Sequence: Synthetic polypeptide
  XENP018450 1G6_H1_L1.103_IgG1_PVA_/S267K Heavy Chain

SEQ ID NO: 19802 - protein, 122 aa, Artificial Sequence; identical to SEQ ID NO: 10922
  Description of Artificial Sequence: Synthetic polypeptide
  VH of XENP018450

SEQ ID NO: 19803 - protein, 5 aa, Artificial Sequence
  Description of Artificial Sequence: Synthetic peptide
  XENP018450 vhCDR1
NYWMN

SEQ ID NO: 19804 - protein, 19 aa, Artificial Sequence
  Description of Artificial Sequence: Synthetic peptide
  XENP018450 vhCDR2
EIRLKSNNYATHYAEPVKG

SEQ ID NO: 19805 - protein, 11 aa, Artificial Sequence
  Description of Artificial Sequence: Synthetic peptide
  XENP018450 vhCDR3
YYGNYGGYFDV

SEQ ID NO: 19806 - protein, 214 aa, Artificial Sequence
  Description of Artificial Sequence: Synthetic polypeptide
  XENP018450 1G6_H1_L1.103_IgG1_PVA_/S267K Light Chain
SIVMTQSPATLSVSPGERATLSCRASQSVSNDVAWYQQKPGQSPRLLINYASHRYTGVPDRFTGSGYGTEFTLTISSVQSEDFAVYFCQQDYSSPRTFGGGTKVEIKRTVAAPSVFIFPPSDEQLKSGTASVVCLLNNFYPREAKVQWKVDNALQSGNSQESVTEQDSKDSTYSLSSTLTLSKADYEKHKVYACEVTHQGLSSPVTKSFNRGEC

SEQ ID NO: 19807 - protein, 107 aa, Artificial Sequence; identical to SEQ ID NO: 14097
  Description of Artificial Sequence: Synthetic polypeptide
  VL of XENP018450

SEQ ID NO: 19808 - protein, 11 aa, Artificial Sequence
  Description of Artificial Sequence: Synthetic peptide
  XENP018450 vlCDR1
RASQSVSNDVA

SEQ ID NO: 19809 - protein, 7 aa, Artificial Sequence
  Description of Artificial Sequence: Synthetic peptide
  XENP018450 vlCDR2
YASHRYT

SEQ ID NO: 19810 - protein, 9 aa, Artificial Sequence
  Description of Artificial Sequence: Synthetic peptide
  XENP018450 vlCDR3
QQDYSSPRT

SEQ ID NO: 19811 - protein, 451 aa, Artificial Sequence; identical to SEQ ID NO: 16221
  Description of Artificial Sequence: Synthetic polypeptide
  XENP018451 1G6_H1_L1.104_IgG1_PVA_/S267K Heavy Chain

SEQ ID NO: 19812 - protein, 122 aa, Artificial Sequence; identical to SEQ ID NO: 10922
  Description of Artificial Sequence: Synthetic polypeptide
  VH of XENP018451

SEQ ID NO: 19813 - protein, 5 aa, Artificial Sequence
  Description of Artificial Sequence: Synthetic peptide
  XENP018451 vhCDR1
NYWMN

SEQ ID NO: 19814 - protein, 19 aa, Artificial Sequence
  Description of Artificial Sequence: Synthetic peptide
  XENP018451 vhCDR2
EIRLKSNNYATHYAEPVKG

SEQ ID NO: 19815 - protein, 11 aa, Artificial Sequence
  Description of Artificial Sequence: Synthetic peptide
  XENP018451 vhCDR3
YYGNYGGYFDV

SEQ ID NO: 19816 - protein, 214 aa, Artificial Sequence
  Description of Artificial Sequence: Synthetic polypeptide
  XENP018451 1G6_H1_L1.104_IgG1_PVA_/S267K Light Chain
SIVMTQSPATLSVSPGERATLSCRASQSVSNDVAWYQQKPGQSPRLLINYASHRYTGVPDRFTGSGYGTEFTLTISSLQAEDFAVYFCQQDYSSPRTFGGGTKVEIKRTVAAPSVFIFPPSDEQLKSGTASVVCLLNNFYPREAKVQWKVDNALQSGNSQESVTEQDSKDSTYSLSSTLTLSKADYEKHKVYACEVTHQGLSSPVTKSFNRGEC

SEQ ID NO: 19817 - protein, 107 aa, Artificial Sequence; identical to SEQ ID NO: 14106
  Description of Artificial Sequence: Synthetic polypeptide
  VL of XENP018451

SEQ ID NO: 19818 - protein, 11 aa, Artificial Sequence
  Description of Artificial Sequence: Synthetic peptide
  XENP018451 vlCDR1
RASQSVSNDVA

SEQ ID NO: 19819 - protein, 7 aa, Artificial Sequence
  Description of Artificial Sequence: Synthetic peptide
  XENP018451 vlCDR2
YASHRYT

SEQ ID NO: 19820 - protein, 9 aa, Artificial Sequence
  Description of Artificial Sequence: Synthetic peptide
  XENP018451 vlCDR3
QQDYSSPRT

SEQ ID NO: 19821 - protein, 451 aa, Artificial Sequence; identical to SEQ ID NO: 16221
  Description of Artificial Sequence: Synthetic polypeptide
  XENP018452 1G6_H1_L1.105_IgG1_PVA_/S267K Heavy Chain

SEQ ID NO: 19822 - protein, 122 aa, Artificial Sequence; identical to SEQ ID NO: 10922
  Description of Artificial Sequence: Synthetic polypeptide
  VH of XENP018452

SEQ ID NO: 19823 - protein, 5 aa, Artificial Sequence
  Description of Artificial Sequence: Synthetic peptide
  XENP018452 vhCDR1
NYWMN

SEQ ID NO: 19824 - protein, 19 aa, Artificial Sequence
  Description of Artificial Sequence: Synthetic peptide
  XENP018452 vhCDR2
EIRLKSNNYATHYAEPVKG

SEQ ID NO: 19825 - protein, 11 aa, Artificial Sequence
  Description of Artificial Sequence: Synthetic peptide
  XENP018452 vhCDR3
YYGNYGGYFDV

SEQ ID NO: 19826 - protein, 214 aa, Artificial Sequence
  Description of Artificial Sequence: Synthetic polypeptide
  XENP018452 1G6_H1_L1.105_IgG1_PVA_/S267K Light Chain
SIVMTQSPATLSVSPGERATLSCRASQSVSNDVAWYQQKPGQSPRLLINYASHRYTGVPDRFTGSGYGTEFTLTISSLQSEDLAVYFCQQDYSSPRTFGGGTKVEIKRTVAAPSVFIFPPSDEQLKSGTASVVCLLNNFYPREAKVQWKVDNALQSGNSQESVTEQDSKDSTYSLSSTLTLSKADYEKHKVYACEVTHQGLSSPVTKSFNRGEC

SEQ ID NO: 19827 - protein, 107 aa, Artificial Sequence; identical to SEQ ID NO: 14115
  Description of Artificial Sequence: Synthetic polypeptide
  VL of XENP018452

SEQ ID NO: 19828 - protein, 11 aa, Artificial Sequence
  Description of Artificial Sequence: Synthetic peptide
  XENP018452 vlCDR1
RASQSVSNDVA

SEQ ID NO: 19829 - protein, 7 aa, Artificial Sequence
  Description of Artificial Sequence: Synthetic peptide
  XENP018452 vlCDR2
YASHRYT

SEQ ID NO: 19830 - protein, 9 aa, Artificial Sequence
  Description of Artificial Sequence: Synthetic peptide
  XENP018452 vlCDR3
QQDYSSPRT

SEQ ID NO: 19831 - protein, 451 aa, Artificial Sequence; identical to SEQ ID NO: 16221
  Description of Artificial Sequence: Synthetic polypeptide
  XENP018453 1G6_H1_L1.106_IgG1_PVA_/S267K Heavy Chain

SEQ ID NO: 19832 - protein, 122 aa, Artificial Sequence; identical to SEQ ID NO: 10922
  Description of Artificial Sequence: Synthetic polypeptide
  VH of XENP018453

SEQ ID NO: 19833 - protein, 5 aa, Artificial Sequence
  Description of Artificial Sequence: Synthetic peptide
  XENP018453 vhCDR1
NYWMN

SEQ ID NO: 19834 - protein, 19 aa, Artificial Sequence
  Description of Artificial Sequence: Synthetic peptide
  XENP018453 vhCDR2
EIRLKSNNYATHYAEPVKG

SEQ ID NO: 19835 - protein, 11 aa, Artificial Sequence
  Description of Artificial Sequence: Synthetic peptide
  XENP018453 vhCDR3
YYGNYGGYFDV

SEQ ID NO: 19836 - protein, 214 aa, Artificial Sequence
  Description of Artificial Sequence: Synthetic polypeptide
  XENP018453 1G6_H1_L1.106_IgG1_PVA_/S267K Light Chain
SIVMTQSPATLSVSPGERATLSCRASQSVSNDVAWYQQKPGQSPRLLINYASHRYTGVPDRFTGSGYGTEFTLTISSLQSEDFAVYYCQQDYSSPRTFGGGTKVEIKRTVAAPSVFIFPPSDEQLKSGTASVVCLLNNFYPREAKVQWKVDNALQSGNSQESVTEQDSKDSTYSLSSTLTLSKADYEKHKVYACEVTHQGLSSPVTKSFNRGEC

SEQ ID NO: 19837 - protein, 107 aa, Artificial Sequence; identical to SEQ ID NO: 14124
  Description of Artificial Sequence: Synthetic polypeptide
  VL of XENP018453

SEQ ID NO: 19838 - protein, 11 aa, Artificial Sequence
  Description of Artificial Sequence: Synthetic peptide
  XENP018453 vlCDR1
RASQSVSNDVA

SEQ ID NO: 19839 - protein, 7 aa, Artificial Sequence
  Description of Artificial Sequence: Synthetic peptide
  XENP018453 vlCDR2
YASHRYT

SEQ ID NO: 19840 - protein, 9 aa, Artificial Sequence
  Description of Artificial Sequence: Synthetic peptide
  XENP018453 vlCDR3
QQDYSSPRT

SEQ ID NO: 19841 - protein, 451 aa, Artificial Sequence; identical to SEQ ID NO: 16221
  Description of Artificial Sequence: Synthetic polypeptide
  XENP018454 1G6_H1_L1.107_IgG1_PVA_/S267K Heavy Chain

SEQ ID NO: 19842 - protein, 122 aa, Artificial Sequence; identical to SEQ ID NO: 10922
  Description of Artificial Sequence: Synthetic polypeptide
  VH of XENP018454

SEQ ID NO: 19843 - protein, 5 aa, Artificial Sequence
  Description of Artificial Sequence: Synthetic peptide
  XENP018454 vhCDR1
NYWMN

SEQ ID NO: 19844 - protein, 19 aa, Artificial Sequence
  Description of Artificial Sequence: Synthetic peptide
  XENP018454 vhCDR2
EIRLKSNNYATHYAEPVKG

SEQ ID NO: 19845 - protein, 11 aa, Artificial Sequence
  Description of Artificial Sequence: Synthetic peptide
  XENP018454 vhCDR3
YYGNYGGYFDV

SEQ ID NO: 19846 - protein, 214 aa, Artificial Sequence
  Description of Artificial Sequence: Synthetic polypeptide
  XENP018454 1G6_H1_L1.107_IgG1_PVA_/S267K Light Chain
SIVMTQSPATLSVSPGERATLSCRASQSVSNDVAWYQQKPGQSPRLLINYASHRYTGVPDRFTGSGYGTEFTLTISSLQSEDFAVYFCQQQYSSPRTFGGGTKVEIKRTVAAPSVFIFPPSDEQLKSGTASVVCLLNNFYPREAKVQWKVDNALQSGNSQESVTEQDSKDSTYSLSSTLTLSKADYEKHKVYACEVTHQGLSSPVTKSFNRGEC

SEQ ID NO: 19847 - protein, 107 aa, Artificial Sequence; identical to SEQ ID NO: 14133
  Description of Artificial Sequence: Synthetic polypeptide
  VL of XENP018454

SEQ ID NO: 19848 - protein, 11 aa, Artificial Sequence
  Description of Artificial Sequence: Synthetic peptide
  XENP018454 vlCDR1
RASQSVSNDVA

SEQ ID NO: 19849 - protein, 7 aa, Artificial Sequence
  Description of Artificial Sequence: Synthetic peptide
  XENP018454 vlCDR2
YASHRYT

SEQ ID NO: 19850 - protein, 9 aa, Artificial Sequence
  Description of Artificial Sequence: Synthetic peptide
  XENP018454 vlCDR3
QQQYSSPRT

SEQ ID NO: 19851 - protein, 451 aa, Artificial Sequence; identical to SEQ ID NO: 16221
  Description of Artificial Sequence: Synthetic polypeptide
  XENP018455 1G6_H1_L1.108_IgG1_PVA_/S267K Heavy Chain

SEQ ID NO: 19852 - protein, 122 aa, Artificial Sequence; identical to SEQ ID NO: 10922
  Description of Artificial Sequence: Synthetic polypeptide
  VH of XENP018455

SEQ ID NO: 19853 - protein, 5 aa, Artificial Sequence
  Description of Artificial Sequence: Synthetic peptide
  XENP018455 vhCDR1
NYWMN

SEQ ID NO: 19854 - protein, 19 aa, Artificial Sequence
  Description of Artificial Sequence: Synthetic peptide
  XENP018455 vhCDR2
EIRLKSNNYATHYAEPVKG

SEQ ID NO: 19855 - protein, 11 aa, Artificial Sequence
  Description of Artificial Sequence: Synthetic peptide
  XENP018455 vhCDR3
YYGNYGGYFDV

SEQ ID NO: 19856 - protein, 214 aa, Artificial Sequence
  Description of Artificial Sequence: Synthetic polypeptide
  XENP018455 1G6_H1_L1.108_IgG1_PVA_/S267K Light Chain
SIVMTQSPATLSVSPGERATLSCRASQSVSNDVAWYQQKPGQSPRLLINYASHRYTGVPDRFTGSGYGTEFTLTISSLQSEDFAVYFCQQEYSSPRTFGGGTKVEIKRTVAAPSVFIFPPSDEQLKSGTASVVCLLNNFYPREAKVQWKVDNALQSGNSQESVTEQDSKDSTYSLSSTLTLSKADYEKHKVYACEVTHQGLSSPVTKSFNRGEC

SEQ ID NO: 19857 - protein, 107 aa, Artificial Sequence; identical to SEQ ID NO: 14142
  Description of Artificial Sequence: Synthetic polypeptide
  VL of XENP018455

SEQ ID NO: 19858 - protein, 11 aa, Artificial Sequence
  Description of Artificial Sequence: Synthetic peptide
  XENP018455 vlCDR1
RASQSVSNDVA

SEQ ID NO: 19859 - protein, 7 aa, Artificial Sequence
  Description of Artificial Sequence: Synthetic peptide
  XENP018455 vlCDR2
YASHRYT

SEQ ID NO: 19860 - protein, 9 aa, Artificial Sequence
  Description of Artificial Sequence: Synthetic peptide
  XENP018455 vlCDR3
QQEYSSPRT

SEQ ID NO: 19861 - protein, 451 aa, Artificial Sequence; identical to SEQ ID NO: 16221
  Description of Artificial Sequence: Synthetic polypeptide
  XENP018456 1G6_H1_L1.109_IgG1_PVA_/S267K Heavy Chain

SEQ ID NO: 19862 - protein, 122 aa, Artificial Sequence; identical to SEQ ID NO: 10922
  Description of Artificial Sequence: Synthetic polypeptide
  VH of XENP018456

SEQ ID NO: 19863 - protein, 5 aa, Artificial Sequence
  Description of Artificial Sequence: Synthetic peptide
  XENP018456 vhCDR1
NYWMN

SEQ ID NO: 19864 - protein, 19 aa, Artificial Sequence
  Description of Artificial Sequence: Synthetic peptide
  XENP018456 vhCDR2
EIRLKSNNYATHYAEPVKG

SEQ ID NO: 19865 - protein, 11 aa, Artificial Sequence
  Description of Artificial Sequence: Synthetic peptide
  XENP018456 vhCDR3
YYGNYGGYFDV

SEQ ID NO: 19866 - protein, 214 aa, Artificial Sequence
  Description of Artificial Sequence: Synthetic polypeptide
  XENP018456 1G6_H1_L1.109_IgG1_PVA_/S267K Light Chain
SIVMTQSPATLSVSPGERATLSCRASQSVSNDVAWYQQKPGQSPRLLINYASHRYTGVPDRFTGSGYGTEFTLTISSLQSEDFAVYFCQQHYSSPRTFGGGTKVEIKRTVAAPSVFIFPPSDEQLKSGTASVVCLLNNFYPREAKVQWKVDNALQSGNSQESVTEQDSKDSTYSLSSTLTLSKADYEKHKVYACEVTHQGLSSPVTKSFNRGEC

SEQ ID NO: 19867 - protein, 107 aa, Artificial Sequence; identical to SEQ ID NO: 14151
  Description of Artificial Sequence: Synthetic polypeptide
  VL of XENP018456

SEQ ID NO: 19868 - protein, 11 aa, Artificial Sequence
  Description of Artificial Sequence: Synthetic peptide
  XENP018456 vlCDR1
RASQSVSNDVA

SEQ ID NO: 19869 - protein, 7 aa, Artificial Sequence
  Description of Artificial Sequence: Synthetic peptide
  XENP018456 vlCDR2
YASHRYT

SEQ ID NO: 19870 - protein, 9 aa, Artificial Sequence
  Description of Artificial Sequence: Synthetic peptide
  XENP018456 vlCDR3
QQHYSSPRT

SEQ ID NO: 19871 - protein, 451 aa, Artificial Sequence; identical to SEQ ID NO: 16221
  Description of Artificial Sequence: Synthetic polypeptide
  XENP018457 1G6_H1_L1.110_IgG1_PVA_/S267K Heavy Chain

SEQ ID NO: 19872 - protein, 122 aa, Artificial Sequence; identical to SEQ ID NO: 10922
  Description of Artificial Sequence: Synthetic polypeptide
  VH of XENP018457

SEQ ID NO: 19873 - protein, 5 aa, Artificial Sequence
  Description of Artificial Sequence: Synthetic peptide
  XENP018457 vhCDR1
NYWMN

SEQ ID NO: 19874 - protein, 19 aa, Artificial Sequence
  Description of Artificial Sequence: Synthetic peptide
  XENP018457 vhCDR2
EIRLKSNNYATHYAEPVKG

SEQ ID NO: 19875 - protein, 11 aa, Artificial Sequence
  Description of Artificial Sequence: Synthetic peptide
  XENP018457 vhCDR3
YYGNYGGYFDV

SEQ ID NO: 19876 - protein, 214 aa, Artificial Sequence
  Description of Artificial Sequence: Synthetic polypeptide
  XENP018457 1G6_H1_L1.110_IgG1_PVA_/S267K Light Chain
SIVMTQSPATLSVSPGERATLSCRASQSVSNDVAWYQQKPGQSPRLLINYASHRYTGVPDRFTGSGYGTEFTLTISSLQSEDFAVYFCQQSYSSPRTFGGGTKVEIKRTVAAPSVFIFPPSDEQLKSGTASVVCLLNNFYPREAKVQWKVDNALQSGNSQESVTEQDSKDSTYSLSSTLTLSKADYEKHKVYACEVTHQGLSSPVTKSFNRGEC

SEQ ID NO: 19877 - protein, 107 aa, Artificial Sequence; identical to SEQ ID NO: 14160
  Description of Artificial Sequence: Synthetic polypeptide
  VL of XENP018457

SEQ ID NO: 19878 - protein, 11 aa, Artificial Sequence
  Description of Artificial Sequence: Synthetic peptide
  XENP018457 vlCDR1
RASQSVSNDVA

SEQ ID NO: 19879 - protein, 7 aa, Artificial Sequence
  Description of Artificial Sequence: Synthetic peptide
  XENP018457 vlCDR2
YASHRYT

SEQ ID NO: 19880 - protein, 9 aa, Artificial Sequence
  Description of Artificial Sequence: Synthetic peptide
  XENP018457 vlCDR3
QQSYSSPRT

SEQ ID NO: 19881 - protein, 451 aa, Artificial Sequence; identical to SEQ ID NO: 16221
  Description of Artificial Sequence: Synthetic polypeptide
  XENP018458 1G6_H1_L1.111_IgG1_PVA_/S267K Heavy Chain

SEQ ID NO: 19882 - protein, 122 aa, Artificial Sequence; identical to SEQ ID NO: 10922
  Description of Artificial Sequence: Synthetic polypeptide
  VH of XENP018458

SEQ ID NO: 19883 - protein, 5 aa, Artificial Sequence
  Description of Artificial Sequence: Synthetic peptide
  XENP018458 vhCDR1
NYWMN

SEQ ID NO: 19884 - protein, 19 aa, Artificial Sequence
  Description of Artificial Sequence: Synthetic peptide
  XENP018458 vhCDR2
EIRLKSNNYATHYAEPVKG

SEQ ID NO: 19885 - protein, 11 aa, Artificial Sequence
  Description of Artificial Sequence: Synthetic peptide
  XENP018458 vhCDR3
YYGNYGGYFDV

SEQ ID NO: 19886 - protein, 214 aa, Artificial Sequence
  Description of Artificial Sequence: Synthetic polypeptide
  XENP018458 1G6_H1_L1.111_IgG1_PVA_/S267K Light Chain
SIVMTQSPATLSVSPGERATLSCRASQSVSNDVAWYQQKPGQSPRLLINYASHRYTGVPDRFTGSGYGTEFTLTISSLQSEDFAVYFCQQRYSSPRTFGGGTKVEIKRTVAAPSVFIFPPSDEQLKSGTASVVCLLNNFYPREAKVQWKVDNALQSGNSQESVTEQDSKDSTYSLSSTLTLSKADYEKHKVYACEVTHQGLSSPVTKSFNRGEC

SEQ ID NO: 19887 - protein, 107 aa, Artificial Sequence; identical to SEQ ID NO: 14169
  Description of Artificial Sequence: Synthetic polypeptide
  VL of XENP018458

SEQ ID NO: 19888 - protein, 11 aa, Artificial Sequence
  Description of Artificial Sequence: Synthetic peptide
  XENP018458 vlCDR1
RASQSVSNDVA

SEQ ID NO: 19889 - protein, 7 aa, Artificial Sequence
  Description of Artificial Sequence: Synthetic peptide
  XENP018458 vlCDR2
YASHRYT

SEQ ID NO: 19890 - protein, 9 aa, Artificial Sequence
  Description of Artificial Sequence: Synthetic peptide
  XENP018458 vlCDR3
QQRYSSPRT

SEQ ID NO: 19891 - protein, 451 aa, Artificial Sequence; identical to SEQ ID NO: 16221
  Description of Artificial Sequence: Synthetic polypeptide
  XENP018459 1G6_H1_L1.112_IgG1_PVA_/S267K Heavy Chain

SEQ ID NO: 19892 - protein, 122 aa, Artificial Sequence; identical to SEQ ID NO: 10922
  Description of Artificial Sequence: Synthetic polypeptide
  VH of XENP018459

SEQ ID NO: 19893 - protein, 5 aa, Artificial Sequence
  Description of Artificial Sequence: Synthetic peptide
  XENP018459 vhCDR1
NYWMN

SEQ ID NO: 19894 - protein, 19 aa, Artificial Sequence
  Description of Artificial Sequence: Synthetic peptide
  XENP018459 vhCDR2
EIRLKSNNYATHYAEPVKG

SEQ ID NO: 19895 - protein, 11 aa, Artificial Sequence
  Description of Artificial Sequence: Synthetic peptide
  XENP018459 vhCDR3
YYGNYGGYFDV

SEQ ID NO: 19896 - protein, 214 aa, Artificial Sequence
  Description of Artificial Sequence: Synthetic polypeptide
  XENP018459 1G6_H1_L1.112_IgG1_PVA_/S267K Light Chain
SIVMTQSPATLSVSPGERATLSCRASQSVSNDVAWYQQKPGQSPRLLINYASHRYTGVPDRFTGSGYGTEFTLTISSLQSEDFAVYFCQQLYSSPRTFGGGTKVEIKRTVAAPSVFIFPPSDEQLKSGTASVVCLLNNFYPREAKVQWKVDNALQSGNSQESVTEQDSKDSTYSLSSTLTLSKADYEKHKVYACEVTHQGLSSPVTKSFNRGEC

SEQ ID NO: 19897 - protein, 107 aa, Artificial Sequence; identical to SEQ ID NO: 14178
  Description of Artificial Sequence: Synthetic polypeptide
  VL of XENP018459

SEQ ID NO: 19898 - protein, 11 aa, Artificial Sequence
  Description of Artificial Sequence: Synthetic peptide
  XENP018459 vlCDR1
RASQSVSNDVA

SEQ ID NO: 19899 - protein, 7 aa, Artificial Sequence
  Description of Artificial Sequence: Synthetic peptide
  XENP018459 vlCDR2
YASHRYT

SEQ ID NO: 19900 - protein, 9 aa, Artificial Sequence
  Description of Artificial Sequence: Synthetic peptide
  XENP018459 vlCDR3
QQLYSSPRT

SEQ ID NO: 19901 - protein, 451 aa, Artificial Sequence; identical to SEQ ID NO: 16221
  Description of Artificial Sequence: Synthetic polypeptide
  XENP018460 1G6_H1_L1.113_IgG1_PVA_/S267K Heavy Chain

SEQ ID NO: 19902 - protein, 122 aa, Artificial Sequence; identical to SEQ ID NO: 10922
  Description of Artificial Sequence: Synthetic polypeptide
  VH of XENP018460

SEQ ID NO: 19903 - protein, 5 aa, Artificial Sequence
  Description of Artificial Sequence: Synthetic peptide
  XENP018460 vhCDR1
NYWMN

SEQ ID NO: 19904 - protein, 19 aa, Artificial Sequence
  Description of Artificial Sequence: Synthetic peptide
  XENP018460 vhCDR2
EIRLKSNNYATHYAEPVKG

SEQ ID NO: 19905 - protein, 11 aa, Artificial Sequence
  Description of Artificial Sequence: Synthetic peptide
  XENP018460 vhCDR3
YYGNYGGYFDV

SEQ ID NO: 19906 - protein, 214 aa, Artificial Sequence
  Description of Artificial Sequence: Synthetic polypeptide
  XENP018460 1G6_H1_L1.113_IgG1_PVA_/S267K Light Chain
SIVMTQSPATLSVSPGERATLSCRASQSVSNDVAWYQQKPGQSPRLLINYASHRYTGVPDRFTGSGYGTEFTLTISSLQSEDFAVYFCQQTYSSPRTFGGGTKVEIKRTVAAPSVFIFPPSDEQLKSGTASVVCLLNNFYPREAKVQWKVDNALQSGNSQESVTEQDSKDSTYSLSSTLTLSKADYEKHKVYACEVTHQGLSSPVTKSFNRGEC

SEQ ID NO: 19907 - protein, 107 aa, Artificial Sequence; identical to SEQ ID NO: 14187
  Description of Artificial Sequence: Synthetic polypeptide
  VL of XENP018460

SEQ ID NO: 19908 - protein, 11 aa, Artificial Sequence
  Description of Artificial Sequence: Synthetic peptide
  XENP018460 vlCDR1
RASQSVSNDVA

SEQ ID NO: 19909 - protein, 7 aa, Artificial Sequence
  Description of Artificial Sequence: Synthetic peptide
  XENP018460 vlCDR2
YASHRYT

SEQ ID NO: 19910 - protein, 9 aa, Artificial Sequence
  Description of Artificial Sequence: Synthetic peptide
  XENP018460 vlCDR3
QQTYSSPRT

SEQ ID NO: 19911 - protein, 451 aa, Artificial Sequence; identical to SEQ ID NO: 16221
  Description of Artificial Sequence: Synthetic polypeptide
  XENP018461 1G6_H1_L1.114_IgG1_PVA_/S267K Heavy Chain

SEQ ID NO: 19912 - protein, 122 aa, Artificial Sequence; identical to SEQ ID NO: 10922
  Description of Artificial Sequence: Synthetic polypeptide
  VH of XENP018461

SEQ ID NO: 19913 - protein, 5 aa, Artificial Sequence
  Description of Artificial Sequence: Synthetic peptide
  XENP018461 vhCDR1
NYWMN

SEQ ID NO: 19914 - protein, 19 aa, Artificial Sequence
  Description of Artificial Sequence: Synthetic peptide
  XENP018461 vhCDR2
EIRLKSNNYATHYAEPVKG

SEQ ID NO: 19915 - protein, 11 aa, Artificial Sequence
  Description of Artificial Sequence: Synthetic peptide
  XENP018461 vhCDR3
YYGNYGGYFDV

SEQ ID NO: 19916 - protein, 214 aa, Artificial Sequence
  Description of Artificial Sequence: Synthetic polypeptide
  XENP018461 1G6_H1_L1.114_IgG1_PVA_/S267K Light Chain
SIVMTQSPATLSVSPGERATLSCRASQSVSNDVAWYQQKPGQSPRLLINYASHRYTGVPDRFTGSGYGTEFTLTISSLQSEDFAVYFCQQGYSSPRTFGGGTKVEIKRTVAAPSVFIFPPSDEQLKSGTASVVCLLNNFYPREAKVQWKVDNALQSGNSQESVTEQDSKDSTYSLSSTLTLSKADYEKHKVYACEVTHQGLSSPVTKSFNRGEC

SEQ ID NO: 19917 - protein, 107 aa, Artificial Sequence; identical to SEQ ID NO: 14196
  Description of Artificial Sequence: Synthetic polypeptide
  VL of XENP018461

SEQ ID NO: 19918 - protein, 11 aa, Artificial Sequence
  Description of Artificial Sequence: Synthetic peptide
  XENP018461 vlCDR1
RASQSVSNDVA

SEQ ID NO: 19919 - protein, 7 aa, Artificial Sequence
  Description of Artificial Sequence: Synthetic peptide
  XENP018461 vlCDR2
YASHRYT

SEQ ID NO: 19920 - protein, 9 aa, Artificial Sequence
  Description of Artificial Sequence: Synthetic peptide
  XENP018461 vlCDR3
QQGYSSPRT

SEQ ID NO: 19921 - protein, 451 aa, Artificial Sequence; identical to SEQ ID NO: 16221
  Description of Artificial Sequence: Synthetic polypeptide
  XENP018462 1G6_H1_L1.115_IgG1_PVA_/S267K Heavy Chain

SEQ ID NO: 19922 - protein, 122 aa, Artificial Sequence; identical to SEQ ID NO: 10922
  Description of Artificial Sequence: Synthetic polypeptide
  VH of XENP018462

SEQ ID NO: 19923 - protein, 5 aa, Artificial Sequence
  Description of Artificial Sequence: Synthetic peptide
  XENP018462 vhCDR1
NYWMN

SEQ ID NO: 19924 - protein, 19 aa, Artificial Sequence
  Description of Artificial Sequence: Synthetic peptide
  XENP018462 vhCDR2
EIRLKSNNYATHYAEPVKG

SEQ ID NO: 19925 - protein, 11 aa, Artificial Sequence
  Description of Artificial Sequence: Synthetic peptide
  XENP018462 vhCDR3
YYGNYGGYFDV

SEQ ID NO: 19926 - protein, 214 aa, Artificial Sequence
  Description of Artificial Sequence: Synthetic polypeptide
  XENP018462 1G6_H1_L1.115_IgG1_PVA_/S267K Light Chain
SIVMTQSPATLSVSPGERATLSCRASQSVSNDVAWYQQKPGQSPRLLINYASHRYTGVPDRFTGSGYGTEFTLTISSLQSEDFAVYFCQQYYSSPRTFGGGTKVEIKRTVAAPSVFIFPPSDEQLKSGTASVVCLLNNFYPREAKVQWKVDNALQSGNSQESVTEQDSKDSTYSLSSTLTLSKADYEKHKVYACEVTHQGLSSPVTKSFNRGEC

SEQ ID NO: 19927 - protein, 107 aa, Artificial Sequence; identical to SEQ ID NO: 14205
  Description of Artificial Sequence: Synthetic polypeptide
  VL of XENP018462

SEQ ID NO: 19928 - protein, 11 aa, Artificial Sequence
  Description of Artificial Sequence: Synthetic peptide
  XENP018462 vlCDR1
RASQSVSNDVA

SEQ ID NO: 19929 - protein, 7 aa, Artificial Sequence
  Description of Artificial Sequence: Synthetic peptide
  XENP018462 vlCDR2
YASHRYT

SEQ ID NO: 19930 - protein, 9 aa, Artificial Sequence
  Description of Artificial Sequence: Synthetic peptide
  XENP018462 vlCDR3
QQYYSSPRT

SEQ ID NO: 19931 - protein, 451 aa, Artificial Sequence; identical to SEQ ID NO: 16221
  Description of Artificial Sequence: Synthetic polypeptide
  XENP018463 1G6_H1_L1.116_IgG1_PVA_/S267K Heavy Chain

SEQ ID NO: 19932 - protein, 122 aa, Artificial Sequence; identical to SEQ ID NO: 10922
  Description of Artificial Sequence: Synthetic polypeptide
  VH of XENP018463

SEQ ID NO: 19933 - protein, 5 aa, Artificial Sequence
  Description of Artificial Sequence: Synthetic peptide
  XENP018463 vhCDR1
NYWMN

SEQ ID NO: 19934 - protein, 19 aa, Artificial Sequence
  Description of Artificial Sequence: Synthetic peptide
  XENP018463 vhCDR2
EIRLKSNNYATHYAEPVKG

SEQ ID NO: 19935 - protein, 11 aa, Artificial Sequence
  Description of Artificial Sequence: Synthetic peptide
  XENP018463 vhCDR3
YYGNYGGYFDV

SEQ ID NO: 19936 - protein, 214 aa, Artificial Sequence
  Description of Artificial Sequence: Synthetic polypeptide
  XENP018463 1G6_H1_L1.116_IgG1_PVA_/S267K Light Chain
SIVMTQSPATLSVSPGERATLSCRASQSVSNDVAWYQQKPGQSPRLLINYASHRYTGVPDRFTGSGYGTEFTLTISSLQSEDFAVYFCQQDFSSPRTFGGGTKVEIKRTVAAPSVFIFPPSDEQLKSGTASVVCLLNNFYPREAKVQWKVDNALQSGNSQESVTEQDSKDSTYSLSSTLTLSKADYEKHKVYACEVTHQGLSSPVTKSFNRGEC

SEQ ID NO: 19937 - protein, 107 aa, Artificial Sequence; identical to SEQ ID NO: 14214
  Description of Artificial Sequence: Synthetic polypeptide
  VL of XENP018463

SEQ ID NO: 19938 - protein, 11 aa, Artificial Sequence
  Description of Artificial Sequence: Synthetic peptide
  XENP018463 vlCDR1
RASQSVSNDVA

SEQ ID NO: 19939 - protein, 7 aa, Artificial Sequence
  Description of Artificial Sequence: Synthetic peptide
  XENP018463 vlCDR2
YASHRYT

SEQ ID NO: 19940 - protein, 9 aa, Artificial Sequence
  Description of Artificial Sequence: Synthetic peptide
  XENP018463 vlCDR3
QQDFSSPRT

SEQ ID NO: 19941 - protein, 451 aa, Artificial Sequence; identical to SEQ ID NO: 16221
  Description of Artificial Sequence: Synthetic polypeptide
  XENP018464 1G6_H1_L1.117_IgG1_PVA_/S267K Heavy Chain

SEQ ID NO: 19942 - protein, 122 aa, Artificial Sequence; identical to SEQ ID NO: 10922
  Description of Artificial Sequence: Synthetic polypeptide
  VH of XENP018464

SEQ ID NO: 19943 - protein, 5 aa, Artificial Sequence
  Description of Artificial Sequence: Synthetic peptide
  XENP018464 vhCDR1
NYWMN

SEQ ID NO: 19944 - protein, 19 aa, Artificial Sequence
  Description of Artificial Sequence: Synthetic peptide
  XENP018464 vhCDR2
EIRLKSNNYATHYAEPVKG

SEQ ID NO: 19945 - protein, 11 aa, Artificial Sequence
  Description of Artificial Sequence: Synthetic peptide
  XENP018464 vhCDR3
YYGNYGGYFDV

SEQ ID NO: 19946 - protein, 214 aa, Artificial Sequence
  Description of Artificial Sequence: Synthetic polypeptide
  XENP018464 1G6_H1_L1.117_IgG1_PVA_/S267K Light Chain
SIVMTQSPATLSVSPGERATLSCRASQSVSNDVAWYQQKPGQSPRLLINYASHRYTGVPDRFTGSGYGTEFTLTISSLQSEDFAVYFCQQDHSSPRTFGGGTKVEIKRTVAAPSVFIFPPSDEQLKSGTASVVCLLNNFYPREAKVQWKVDNALQSGNSQESVTEQDSKDSTYSLSSTLTLSKADYEKHKVYACEVTHQGLSSPVTKSFNRGEC

SEQ ID NO: 19947 - protein, 107 aa, Artificial Sequence; identical to SEQ ID NO: 14223
  Description of Artificial Sequence: Synthetic polypeptide
  VL of XENP018464

SEQ ID NO: 19948 - protein, 11 aa, Artificial Sequence
  Description of Artificial Sequence: Synthetic peptide
  XENP018464 vlCDR1
RASQSVSNDVA

SEQ ID NO: 19949 - protein, 7 aa, Artificial Sequence
  Description of Artificial Sequence: Synthetic peptide
  XENP018464 vlCDR2
YASHRYT

SEQ ID NO: 19950 - protein, 9 aa, Artificial Sequence
  Description of Artificial Sequence: Synthetic peptide
  XENP018464 vlCDR3
QQDHSSPRT

SEQ ID NO: 19951 - protein, 451 aa, Artificial Sequence; identical to SEQ ID NO: 16221
  Description of Artificial Sequence: Synthetic polypeptide
  XENP018465 1G6_H1_L1.118_IgG1_PVA_/S267K Heavy Chain

SEQ ID NO: 19952 - protein, 122 aa, Artificial Sequence; identical to SEQ ID NO: 10922
  Description of Artificial Sequence: Synthetic polypeptide
  VH of XENP018465

SEQ ID NO: 19953 - protein, 5 aa, Artificial Sequence
  Description of Artificial Sequence: Synthetic peptide
  XENP018465 vhCDR1
NYWMN

SEQ ID NO: 19954 - protein, 19 aa, Artificial Sequence
  Description of Artificial Sequence: Synthetic peptide
  XENP018465 vhCDR2
EIRLKSNNYATHYAEPVKG

SEQ ID NO: 19955 - protein, 11 aa, Artificial Sequence
  Description of Artificial Sequence: Synthetic peptide
  XENP018465 vhCDR3
YYGNYGGYFDV

SEQ ID NO: 19956 - protein, 214 aa, Artificial Sequence
  Description of Artificial Sequence: Synthetic polypeptide
  XENP018465 1G6_H1_L1.118_IgG1_PVA_/S267K Light Chain
SIVMTQSPATLSVSPGERATLSCRASQSVSNDVAWYQQKPGQSPRLLINYASHRYTGVPDRFTGSGYGTEFTLTISSLQSEDFAVYFCQQDLSSPRTFGGGTKVEIKRTVAAPSVFIFPPSDEQLKSGTASVVCLLNNFYPREAKVQWKVDNALQSGNSQESVTEQDSKDSTYSLSSTLTLSKADYEKHKVYACEVTHQGLSSPVTKSFNRGEC

SEQ ID NO: 19957 - protein, 107 aa, Artificial Sequence; identical to SEQ ID NO: 14232
  Description of Artificial Sequence: Synthetic polypeptide
  VL of XENP018465

SEQ ID NO: 19958 - protein, 11 aa, Artificial Sequence
  Description of Artificial Sequence: Synthetic peptide
  XENP018465 vlCDR1
RASQSVSNDVA

SEQ ID NO: 19959 - protein, 7 aa, Artificial Sequence
  Description of Artificial Sequence: Synthetic peptide
  XENP018465 vlCDR2
YASHRYT

SEQ ID NO: 19960 - protein, 9 aa, Artificial Sequence
  Description of Artificial Sequence: Synthetic peptide
  XENP018465 vlCDR3
QQDLSSPRT

SEQ ID NO: 19961 - protein, 451 aa, Artificial Sequence; identical to SEQ ID NO: 16221
  Description of Artificial Sequence: Synthetic polypeptide
  XENP018466 1G6_H1_L1.119_IgG1_PVA_/S267K Heavy Chain

SEQ ID NO: 19962 - protein, 122 aa, Artificial Sequence; identical to SEQ ID NO: 10922
  Description of Artificial Sequence: Synthetic polypeptide
  VH of XENP018466

SEQ ID NO: 19963 - protein, 5 aa, Artificial Sequence
  Description of Artificial Sequence: Synthetic peptide
  XENP018466 vhCDR1
NYWMN

SEQ ID NO: 19964 - protein, 19 aa, Artificial Sequence
  Description of Artificial Sequence: Synthetic peptide
  XENP018466 vhCDR2
EIRLKSNNYATHYAEPVKG

SEQ ID NO: 19965 - protein, 11 aa, Artificial Sequence
  Description of Artificial Sequence: Synthetic peptide
  XENP018466 vhCDR3
YYGNYGGYFDV

SEQ ID NO: 19966 - protein, 214 aa, Artificial Sequence
  Description of Artificial Sequence: Synthetic polypeptide
  XENP018466 1G6_H1_L1.119_IgG1_PVA_/S267K Light Chain
SIVMTQSPATLSVSPGERATLSCRASQSVSNDVAWYQQKPGQSPRLLINYASHRYTGVPDRFTGSGYGTEFTLTISSLQSEDFAVYFCQQDWSSPRTFGGGTKVEIKRTVAAPSVFIFPPSDEQLKSGTASVVCLLNNFYPREAKVQWKVDNALQSGNSQESVTEQDSKDSTYSLSSTLTLSKADYEKHKVYACEVTHQGLSSPVTKSFNRGEC

SEQ ID NO: 19967 - protein, 107 aa, Artificial Sequence; identical to SEQ ID NO: 14241
  Description of Artificial Sequence: Synthetic polypeptide
  VL of XENP018466

SEQ ID NO: 19968 - protein, 11 aa, Artificial Sequence
  Description of Artificial Sequence: Synthetic peptide
  XENP018466 vlCDR1
RASQSVSNDVA

SEQ ID NO: 19969 - protein, 7 aa, Artificial Sequence
  Description of Artificial Sequence: Synthetic peptide
  XENP018466 vlCDR2
YASHRYT

SEQ ID NO: 19970 - protein, 9 aa, Artificial Sequence
  Description of Artificial Sequence: Synthetic peptide
  XENP018466 vlCDR3
QQDWSSPRT

SEQ ID NO: 19971 - protein, 451 aa, Artificial Sequence; identical to SEQ ID NO: 16221
  Description of Artificial Sequence: Synthetic polypeptide
  XENP018467 1G6_H1_L1.120_IgG1_PVA_/S267K Heavy Chain

SEQ ID NO: 19972 - protein, 122 aa, Artificial Sequence; identical to SEQ ID NO: 10922
  Description of Artificial Sequence: Synthetic polypeptide
  VH of XENP018467

SEQ ID NO: 19973 - protein, 5 aa, Artificial Sequence
  Description of Artificial Sequence: Synthetic peptide
  XENP018467 vhCDR1
NYWMN

SEQ ID NO: 19974 - protein, 19 aa, Artificial Sequence
  Description of Artificial Sequence: Synthetic peptide
  XENP018467 vhCDR2
EIRLKSNNYATHYAEPVKG

SEQ ID NO: 19975 - protein, 11 aa, Artificial Sequence
  Description of Artificial Sequence: Synthetic peptide
  XENP018467 vhCDR3
YYGNYGGYFDV

SEQ ID NO: 19976 - protein, 214 aa, Artificial Sequence
  Description of Artificial Sequence: Synthetic polypeptide
  XENP018467 1G6_H1_L1.120_IgG1_PVA_/S267K Light Chain
SIVMTQSPATLSVSPGERATLSCRASQSVSNDVAWYQQKPGQSPRLLINYASHRYTGVPDRFTGSGYGTEFTLTISSLQSEDFAVYFCQQDVSSPRTFGGGTKVEIKRTVAAPSVFIFPPSDEQLKSGTASVVCLLNNFYPREAKVQWKVDNALQSGNSQESVTEQDSKDSTYSLSSTLTLSKADYEKHKVYACEVTHQGLSSPVTKSFNRGEC

SEQ ID NO: 19977 - protein, 107 aa, Artificial Sequence; identical to SEQ ID NO: 14250
  Description of Artificial Sequence: Synthetic polypeptide
  VL of XENP018467

SEQ ID NO: 19978 - protein, 11 aa, Artificial Sequence
  Description of Artificial Sequence: Synthetic peptide
  XENP018467 vlCDR1
RASQSVSNDVA

SEQ ID NO: 19979 - protein, 7 aa, Artificial Sequence
  Description of Artificial Sequence: Synthetic peptide
  XENP018467 vlCDR2
YASHRYT

SEQ ID NO: 19980 - protein, 9 aa, Artificial Sequence
  Description of Artificial Sequence: Synthetic peptide
  XENP018467 vlCDR3
QQDVSSPRT

SEQ ID NO: 19981 - protein, 451 aa, Artificial Sequence; identical to SEQ ID NO: 16221
  Description of Artificial Sequence: Synthetic polypeptide
  XENP018468 1G6_H1_L1.121_IgG1_PVA_/S267K Heavy Chain

SEQ ID NO: 19982 - protein, 122 aa, Artificial Sequence; identical to SEQ ID NO: 10922
  Description of Artificial Sequence: Synthetic polypeptide
  VH of XENP018468

SEQ ID NO: 19983 - protein, 5 aa, Artificial Sequence
  Description of Artificial Sequence: Synthetic peptide
  XENP018468 vhCDR1
NYWMN

SEQ ID NO: 19984 - protein, 19 aa, Artificial Sequence
  Description of Artificial Sequence: Synthetic peptide
  XENP018468 vhCDR2
EIRLKSNNYATHYAEPVKG

SEQ ID NO: 19985 - protein, 11 aa, Artificial Sequence
  Description of Artificial Sequence: Synthetic peptide
  XENP018468 vhCDR3
YYGNYGGYFDV

SEQ ID NO: 19986 - protein, 214 aa, Artificial Sequence
  Description of Artificial Sequence: Synthetic polypeptide
  XENP018468 1G6_H1_L1.121_IgG1_PVA_/S267K Light Chain
SIVMTQSPATLSVSPGERATLSCRASQSVSNDVAWYQQKPGQSPRLLINYASHRYTGVPDRFTGSGYGTEFTLTISSLQSEDFAVYFCQQDASSPRTFGGGTKVEIKRTVAAPSVFIFPPSDEQLKSGTASVVCLLNNFYPREAKVQWKVDNALQSGNSQESVTEQDSKDSTYSLSSTLTLSKADYEKHKVYACEVTHQGLSSPVTKSFNRGEC

SEQ ID NO: 19987 - protein, 107 aa, Artificial Sequence; identical to SEQ ID NO: 14259
  Description of Artificial Sequence: Synthetic polypeptide
  VL of XENP018468

SEQ ID NO: 19988 - protein, 11 aa, Artificial Sequence
  Description of Artificial Sequence: Synthetic peptide
  XENP018468 vlCDR1
RASQSVSNDVA

SEQ ID NO: 19989 - protein, 7 aa, Artificial Sequence
  Description of Artificial Sequence: Synthetic peptide
  XENP018468 vlCDR2
YASHRYT

SEQ ID NO: 19990 - protein, 9 aa, Artificial Sequence
  Description of Artificial Sequence: Synthetic peptide
  XENP018468 vlCDR3
QQDASSPRT

SEQ ID NO: 19991 - protein, 451 aa, Artificial Sequence; identical to SEQ ID NO: 16221
  Description of Artificial Sequence: Synthetic polypeptide
  XENP018469 1G6_H1_L1.122_IgG1_PVA_/S267K Heavy Chain

SEQ ID NO: 19992 - protein, 122 aa, Artificial Sequence; identical to SEQ ID NO: 10922
  Description of Artificial Sequence: Synthetic polypeptide
  VH of XENP018469

SEQ ID NO: 19993 - protein, 5 aa, Artificial Sequence
  Description of Artificial Sequence: Synthetic peptide
  XENP018469 vhCDR1
NYWMN

SEQ ID NO: 19994 - protein, 19 aa, Artificial Sequence
  Description of Artificial Sequence: Synthetic peptide
  XENP018469 vhCDR2
EIRLKSNNYATHYAEPVKG

SEQ ID NO: 19995 - protein, 11 aa, Artificial Sequence
  Description of Artificial Sequence: Synthetic peptide
  XENP018469 vhCDR3
YYGNYGGYFDV

SEQ ID NO: 19996 - protein, 214 aa, Artificial Sequence
  Description of Artificial Sequence: Synthetic polypeptide
  XENP018469 1G6_H1_L1.122_IgG1_PVA_/S267K Light Chain
SIVMTQSPATLSVSPGERATLSCRASQSVSNDVAWYQQKPGQSPRLLINYASHRYTGVPDRFTGSGYGTEFTLTISSLQSEDFAVYFCQQDQSSPRTFGGGTKVEIKRTVAAPSVFIFPPSDEQLKSGTASVVCLLNNFYPREAKVQWKVDNALQSGNSQESVTEQDSKDSTYSLSSTLTLSKADYEKHKVYACEVTHQGLSSPVTKSFNRGEC

SEQ ID NO: 19997 - protein, 107 aa, Artificial Sequence; identical to SEQ ID NO: 14268
  Description of Artificial Sequence: Synthetic polypeptide
  VL of XENP018469

SEQ ID NO: 19998 - protein, 11 aa, Artificial Sequence
  Description of Artificial Sequence: Synthetic peptide
  XENP018469 vlCDR1
RASQSVSNDVA

SEQ ID NO: 19999 - protein, 7 aa, Artificial Sequence
  Description of Artificial Sequence: Synthetic peptide
  XENP018469 vlCDR2
YASHRYT

SEQ ID NO: 20000 - protein, 9 aa, Artificial Sequence
  Description of Artificial Sequence: Synthetic peptide
  XENP018469 vlCDR3
QQDQSSPRT

SEQ ID NO: 20001 - protein, 451 aa, Artificial Sequence; identical to SEQ ID NO: 16221
  Description of Artificial Sequence: Synthetic polypeptide
  XENP018470 1G6_H1_L1.123_IgG1_PVA_/S267K Heavy Chain

SEQ ID NO: 20002 - protein, 122 aa, Artificial Sequence; identical to SEQ ID NO: 10922
  Description of Artificial Sequence: Synthetic polypeptide
  VH of XENP018470

SEQ ID NO: 20003 - protein, 5 aa, Artificial Sequence
  Description of Artificial Sequence: Synthetic peptide
  XENP018470 vhCDR1
NYWMN

SEQ ID NO: 20004 - protein, 19 aa, Artificial Sequence
  Description of Artificial Sequence: Synthetic peptide
  XENP018470 vhCDR2
EIRLKSNNYATHYAEPVKG

SEQ ID NO: 20005 - protein, 11 aa, Artificial Sequence
  Description of Artificial Sequence: Synthetic peptide
  XENP018470 vhCDR3
YYGNYGGYFDV

SEQ ID NO: 20006 - protein, 214 aa, Artificial Sequence
  Description of Artificial Sequence: Synthetic polypeptide
  XENP018470 1G6_H1_L1.123_IgG1_PVA_/S267K Light Chain
SIVMTQSPATLSVSPGERATLSCRASQSVSNDVAWYQQKPGQSPRLLINYASHRYTGVPDRFTGSGYGTEFTLTISSLQSEDFAVYFCQQDDSSPRTFGGGTKVEIKRTVAAPSVFIFPPSDEQLKSGTASVVCLLNNFYPREAKVQWKVDNALQSGNSQESVTEQDSKDSTYSLSSTLTLSKADYEKHKVYACEVTHQGLSSPVTKSFNRGEC

SEQ ID NO: 20007 - protein, 107 aa, Artificial Sequence; identical to SEQ ID NO: 14277
  Description of Artificial Sequence: Synthetic polypeptide
  VL of XENP018470

SEQ ID NO: 20008 - protein, 11 aa, Artificial Sequence
  Description of Artificial Sequence: Synthetic peptide
  XENP018470 vlCDR1
RASQSVSNDVA

SEQ ID NO: 20009 - protein, 7 aa, Artificial Sequence
  Description of Artificial Sequence: Synthetic peptide
  XENP018470 vlCDR2
YASHRYT

SEQ ID NO: 20010 - protein, 9 aa, Artificial Sequence
  Description of Artificial Sequence: Synthetic peptide
  XENP018470 vlCDR3
QQDDSSPRT

SEQ ID NO: 20011 - protein, 451 aa, Artificial Sequence; identical to SEQ ID NO: 16221
  Description of Artificial Sequence: Synthetic polypeptide
  XENP018471 1G6_H1_L1.124_IgG1_PVA_/S267K Heavy Chain

SEQ ID NO: 20012 - protein, 122 aa, Artificial Sequence; identical to SEQ ID NO: 10922
  Description of Artificial Sequence: Synthetic polypeptide
  VH of XENP018471

SEQ ID NO: 20013 - protein, 5 aa, Artificial Sequence
  Description of Artificial Sequence: Synthetic peptide
  XENP018471 vhCDR1
NYWMN

SEQ ID NO: 20014 - protein, 19 aa, Artificial Sequence
  Description of Artificial Sequence: Synthetic peptide
  XENP018471 vhCDR2
EIRLKSNNYATHYAEPVKG

SEQ ID NO: 20015 - protein, 11 aa, Artificial Sequence
  Description of Artificial Sequence: Synthetic peptide
  XENP018471 vhCDR3
YYGNYGGYFDV

SEQ ID NO: 20016 - protein, 214 aa, Artificial Sequence
  Description of Artificial Sequence: Synthetic polypeptide
  XENP018471 1G6_H1_L1.124_IgG1_PVA_/S267K Light Chain
SIVMTQSPATLSVSPGERATLSCRASQSVSNDVAWYQQKPGQSPRLLINYASHRYTGVPDRFTGSGYGTEFTLTISSLQSEDFAVYFCQQDKSSPRTFGGGTKVEIKRTVAAPSVFIFPPSDEQLKSGTASVVCLLNNFYPREAKVQWKVDNALQSGNSQESVTEQDSKDSTYSLSSTLTLSKADYEKHKVYACEVTHQGLSSPVTKSFNRGEC

SEQ ID NO: 20017 - protein, 107 aa, Artificial Sequence; identical to SEQ ID NO: 14286
  Description of Artificial Sequence: Synthetic polypeptide
  VL of XENP018471

SEQ ID NO: 20018 - protein, 11 aa, Artificial Sequence
  Description of Artificial Sequence: Synthetic peptide
  XENP018471 vlCDR1
RASQSVSNDVA

SEQ ID NO: 20019 - protein, 7 aa, Artificial Sequence
  Description of Artificial Sequence: Synthetic peptide
  XENP018471 vlCDR2
YASHRYT

SEQ ID NO: 20020 - protein, 9 aa, Artificial Sequence
  Description of Artificial Sequence: Synthetic peptide
  XENP018471 vlCDR3
QQDKSSPRT

SEQ ID NO: 20021 - protein, 451 aa, Artificial Sequence; identical to SEQ ID NO: 16221
  Description of Artificial Sequence: Synthetic polypeptide
  XENP018472 1G6_H1_L1.125_IgG1_PVA_/S267K Heavy Chain

SEQ ID NO: 20022 - protein, 122 aa, Artificial Sequence; identical to SEQ ID NO: 10922
  Description of Artificial Sequence: Synthetic polypeptide
  VH of XENP018472

SEQ ID NO: 20023 - protein, 5 aa, Artificial Sequence
  Description of Artificial Sequence: Synthetic peptide
  XENP018472 vhCDR1
NYWMN

SEQ ID NO: 20024 - protein, 19 aa, Artificial Sequence
  Description of Artificial Sequence: Synthetic peptide
  XENP018472 vhCDR2
EIRLKSNNYATHYAEPVKG

SEQ ID NO: 20025 - protein, 11 aa, Artificial Sequence
  Description of Artificial Sequence: Synthetic peptide
  XENP018472 vhCDR3
YYGNYGGYFDV

SEQ ID NO: 20026 - protein, 214 aa, Artificial Sequence
  Description of Artificial Sequence: Synthetic polypeptide
  XENP018472 1G6_H1_L1.125_IgG1_PVA_/S267K Light Chain
SIVMTQSPATLSVSPGERATLSCRASQSVSNDVAWYQQKPGQSPRLLINYASHRYTGVPDRFTGSGYGTEFTLTISSLQSEDFAVYFCQQDSSSPRTFGGGTKVEIKRTVAAPSVFIFPPSDEQLKSGTASVVCLLNNFYPREAKVQWKVDNALQSGNSQESVTEQDSKDSTYSLSSTLTLSKADYEKHKVYACEVTHQGLSSPVTKSFNRGEC

SEQ ID NO: 20027 - protein, 107 aa, Artificial Sequence; identical to SEQ ID NO: 14295
  Description of Artificial Sequence: Synthetic polypeptide
  VL of XENP018472

SEQ ID NO: 20028 - protein, 11 aa, Artificial Sequence
  Description of Artificial Sequence: Synthetic peptide
  XENP018472 vlCDR1
RASQSVSNDVA

SEQ ID NO: 20029 - protein, 7 aa, Artificial Sequence
  Description of Artificial Sequence: Synthetic peptide
  XENP018472 vlCDR2
YASHRYT

SEQ ID NO: 20030 - protein, 9 aa, Artificial Sequence
  Description of Artificial Sequence: Synthetic peptide
  XENP018472 vlCDR3
QQDSSSPRT

SEQ ID NO: 20031 - protein, 451 aa, Artificial Sequence; identical to SEQ ID NO: 16221
  Description of Artificial Sequence: Synthetic polypeptide
  XENP018473 1G6_H1_L1.126_IgG1_PVA_/S267K Heavy Chain

SEQ ID NO: 20032 - protein, 122 aa, Artificial Sequence; identical to SEQ ID NO: 10922
  Description of Artificial Sequence: Synthetic polypeptide
  VH of XENP018473

SEQ ID NO: 20033 - protein, 5 aa, Artificial Sequence
  Description of Artificial Sequence: Synthetic peptide
  XENP018473 vhCDR1
NYWMN

SEQ ID NO: 20034 - protein, 19 aa, Artificial Sequence
  Description of Artificial Sequence: Synthetic peptide
  XENP018473 vhCDR2
EIRLKSNNYATHYAEPVKG

SEQ ID NO: 20035 - protein, 11 aa, Artificial Sequence
  Description of Artificial Sequence: Synthetic peptide
  XENP018473 vhCDR3
YYGNYGGYFDV

SEQ ID NO: 20036 - protein, 214 aa, Artificial Sequence
  Description of Artificial Sequence: Synthetic polypeptide
  XENP018473 1G6_H1_L1.126_IgG1_PVA_/S267K Light Chain
SIVMTQSPATLSVSPGERATLSCRASQSVSNDVAWYQQKPGQSPRLLINYASHRYTGVPDRFTGSGYGTEFTLTISSLQSEDFAVYFCQQDGSSPRTFGGGTKVEIKRTVAAPSVFIFPPSDEQLKSGTASVVCLLNNFYPREAKVQWKVDNALQSGNSQESVTEQDSKDSTYSLSSTLTLSKADYEKHKVYACEVTHQGLSSPVTKSFNRGEC

SEQ ID NO: 20037 - protein, 107 aa, Artificial Sequence; identical to SEQ ID NO: 14304
  Description of Artificial Sequence: Synthetic polypeptide
  VL of XENP018473

SEQ ID NO: 20038 - protein, 11 aa, Artificial Sequence
  Description of Artificial Sequence: Synthetic peptide
  XENP018473 vlCDR1
RASQSVSNDVA

SEQ ID NO: 20039 - protein, 7 aa, Artificial Sequence
  Description of Artificial Sequence: Synthetic peptide
  XENP018473 vlCDR2
YASHRYT

SEQ ID NO: 20040 - protein, 9 aa, Artificial Sequence
  Description of Artificial Sequence: Synthetic peptide
  XENP018473 vlCDR3
QQDGSSPRT

SEQ ID NO: 20041 - protein, 451 aa, Artificial Sequence; identical to SEQ ID NO: 16221
  Description of Artificial Sequence: Synthetic polypeptide
  XENP018474 1G6_H1_L1.127_IgG1_PVA_/S267K Heavy Chain

SEQ ID NO: 20042 - protein, 122 aa, Artificial Sequence; identical to SEQ ID NO: 10922
  Description of Artificial Sequence: Synthetic polypeptide
  VH of XENP018474

SEQ ID NO: 20043 - protein, 5 aa, Artificial Sequence
  Description of Artificial Sequence: Synthetic peptide
  XENP018474 vhCDR1
NYWMN

SEQ ID NO: 20044 - protein, 19 aa, Artificial Sequence
  Description of Artificial Sequence: Synthetic peptide
  XENP018474 vhCDR2
EIRLKSNNYATHYAEPVKG

SEQ ID NO: 20045 - protein, 11 aa, Artificial Sequence
  Description of Artificial Sequence: Synthetic peptide
  XENP018474 vhCDR3
YYGNYGGYFDV

SEQ ID NO: 20046 - protein, 214 aa, Artificial Sequence
  Description of Artificial Sequence: Synthetic polypeptide
  XENP018474 1G6_H1_L1.127_IgG1_PVA_/S267K Light Chain
SIVMTQSPATLSVSPGERATLSCRASQSVSNDVAWYQQKPGQSPRLLINYASHRYTGVPDRFTGSGYGTEFTLTISSLQSEDFAVYFCQQDYTSPRTFGGGTKVEIKRTVAAPSVFIFPPSDEQLKSGTASVVCLLNNFYPREAKVQWKVDNALQSGNSQESVTEQDSKDSTYSLSSTLTLSKADYEKHKVYACEVTHQGLSSPVTKSFNRGEC

SEQ ID NO: 20047 - protein, 107 aa, Artificial Sequence; identical to SEQ ID NO: 14313
  Description of Artificial Sequence: Synthetic polypeptide
  VL of XENP018474

SEQ ID NO: 20048 - protein, 11 aa, Artificial Sequence
  Description of Artificial Sequence: Synthetic peptide
  XENP018474 vlCDR1
RASQSVSNDVA

SEQ ID NO: 20049 - protein, 7 aa, Artificial Sequence
  Description of Artificial Sequence: Synthetic peptide
  XENP018474 vlCDR2
YASHRYT

SEQ ID NO: 20050 - protein, 9 aa, Artificial Sequence
  Description of Artificial Sequence: Synthetic peptide
  XENP018474 vlCDR3
QQDYTSPRT

SEQ ID NO: 20051 - protein, 451 aa, Artificial Sequence; identical to SEQ ID NO: 16221
  Description of Artificial Sequence: Synthetic polypeptide
  XENP018475 1G6_H1_L1.128_IgG1_PVA_/S267K Heavy Chain

SEQ ID NO: 20052 - protein, 122 aa, Artificial Sequence; identical to SEQ ID NO: 10922
  Description of Artificial Sequence: Synthetic polypeptide
  VH of XENP018475

SEQ ID NO: 20053 - protein, 5 aa, Artificial Sequence
  Description of Artificial Sequence: Synthetic peptide
  XENP018475 vhCDR1
NYWMN

SEQ ID NO: 20054 - protein, 19 aa, Artificial Sequence
  Description of Artificial Sequence: Synthetic peptide
  XENP018475 vhCDR2
EIRLKSNNYATHYAEPVKG

SEQ ID NO: 20055 - protein, 11 aa, Artificial Sequence
  Description of Artificial Sequence: Synthetic peptide
  XENP018475 vhCDR3
YYGNYGGYFDV

SEQ ID NO: 20056 - protein, 214 aa, Artificial Sequence
  Description of Artificial Sequence: Synthetic polypeptide
  XENP018475 1G6_H1_L1.128_IgG1_PVA_/S267K Light Chain
SIVMTQSPATLSVSPGERATLSCRASQSVSNDVAWYQQKPGQSPRLLINYASHRYTGVPDRFTGSGYGTEFTLTISSLQSEDFAVYFCQQDYASPRTFGGGTKVEIKRTVAAPSVFIFPPSDEQLKSGTASVVCLLNNFYPREAKVQWKVDNALQSGNSQESVTEQDSKDSTYSLSSTLTLSKADYEKHKVYACEVTHQGLSSPVTKSFNRGEC

SEQ ID NO: 20057 - protein, 107 aa, Artificial Sequence; identical to SEQ ID NO: 14322
  Description of Artificial Sequence: Synthetic polypeptide
  VL of XENP018475

SEQ ID NO: 20058 - protein, 11 aa, Artificial Sequence
  Description of Artificial Sequence: Synthetic peptide
  XENP018475 vlCDR1
RASQSVSNDVA

SEQ ID NO: 20059 - protein, 7 aa, Artificial Sequence
  Description of Artificial Sequence: Synthetic peptide
  XENP018475 vlCDR2
YASHRYT

SEQ ID NO: 20060 - protein, 9 aa, Artificial Sequence
  Description of Artificial Sequence: Synthetic peptide
  XENP018475 vlCDR3
QQDYASPRT

SEQ ID NO: 20061 - protein, 451 aa, Artificial Sequence; identical to SEQ ID NO: 16221
  Description of Artificial Sequence: Synthetic polypeptide
  XENP018476 1G6_H1_L1.129_IgG1_PVA_/S267K Heavy Chain

SEQ ID NO: 20062 - protein, 122 aa, Artificial Sequence; identical to SEQ ID NO: 10922
  Description of Artificial Sequence: Synthetic polypeptide
  VH of XENP018476

SEQ ID NO: 20063 - protein, 5 aa, Artificial Sequence
  Description of Artificial Sequence: Synthetic peptide
  XENP018476 vhCDR1
NYWMN

SEQ ID NO: 20064 - protein, 19 aa, Artificial Sequence
  Description of Artificial Sequence: Synthetic peptide
  XENP018476 vhCDR2
EIRLKSNNYATHYAEPVKG

SEQ ID NO: 20065 - protein, 11 aa, Artificial Sequence
  Description of Artificial Sequence: Synthetic peptide
  XENP018476 vhCDR3
YYGNYGGYFDV

SEQ ID NO: 20066 - protein, 214 aa, Artificial Sequence
  Description of Artificial Sequence: Synthetic polypeptide
  XENP018476 1G6_H1_L1.129_IgG1_PVA_/S267K Light Chain
SIVMTQSPATLSVSPGERATLSCRASQSVSNDVAWYQQKPGQSPRLLINYASHRYTGVPDRFTGSGYGTEFTLTISSLQSEDFAVYFCQQDYQSPRTFGGGTKVEIKRTVAAPSVFIFPPSDEQLKSGTASVVCLLNNFYPREAKVQWKVDNALQSGNSQESVTEQDSKDSTYSLSSTLTLSKADYEKHKVYACEVTHQGLSSPVTKSFNRGEC

SEQ ID NO: 20067 - protein, 107 aa, Artificial Sequence; identical to SEQ ID NO: 14331
  Description of Artificial Sequence: Synthetic polypeptide
  VL of XENP018476

SEQ ID NO: 20068 - protein, 11 aa, Artificial Sequence
  Description of Artificial Sequence: Synthetic peptide
  XENP018476 vlCDR1
RASQSVSNDVA

SEQ ID NO: 20069 - protein, 7 aa, Artificial Sequence
  Description of Artificial Sequence: Synthetic peptide
  XENP018476 vlCDR2
YASHRYT

SEQ ID NO: 20070 - protein, 9 aa, Artificial Sequence
  Description of Artificial Sequence: Synthetic peptide
  XENP018476 vlCDR3
QQDYQSPRT

SEQ ID NO: 20071 - protein, 451 aa, Artificial Sequence; identical to SEQ ID NO: 16221
  Description of Artificial Sequence: Synthetic polypeptide
  XENP018477 1G6_H1_L1.130_IgG1_PVA_/S267K Heavy Chain

SEQ ID NO: 20072 - protein, 122 aa, Artificial Sequence; identical to SEQ ID NO: 10922
  Description of Artificial Sequence: Synthetic polypeptide
  VH of XENP018477

SEQ ID NO: 20073 - protein, 5 aa, Artificial Sequence
  Description of Artificial Sequence: Synthetic peptide
  XENP018477 vhCDR1
NYWMN

SEQ ID NO: 20074 - protein, 19 aa, Artificial Sequence
  Description of Artificial Sequence: Synthetic peptide
  XENP018477 vhCDR2
EIRLKSNNYATHYAEPVKG

SEQ ID NO: 20075 - protein, 11 aa, Artificial Sequence
  Description of Artificial Sequence: Synthetic peptide
  XENP018477 vhCDR3
YYGNYGGYFDV

SEQ ID NO: 20076 - protein, 214 aa, Artificial Sequence
  Description of Artificial Sequence: Synthetic polypeptide
  XENP018477 1G6_H1_L1.130_IgG1_PVA_/S267K Light Chain
SIVMTQSPATLSVSPGERATLSCRASQSVSNDVAWYQQKPGQSPRLLINYASHRYTGVPDRFTGSGYGTEFTLTISSLQSEDFAVYFCQQDYGSPRTFGGGTKVEIKRTVAAPSVFIFPPSDEQLKSGTASVVCLLNNFYPREAKVQWKVDNALQSGNSQESVTEQDSKDSTYSLSSTLTLSKADYEKHKVYACEVTHQGLSSPVTKSFNRGEC

SEQ ID NO: 20077 - protein, 107 aa, Artificial Sequence; identical to SEQ ID NO: 14340
  Description of Artificial Sequence: Synthetic polypeptide
  VL of XENP018477

SEQ ID NO: 20078 - protein, 11 aa, Artificial Sequence
  Description of Artificial Sequence: Synthetic peptide
  XENP018477 vlCDR1
RASQSVSNDVA

SEQ ID NO: 20079 - protein, 7 aa, Artificial Sequence
  Description of Artificial Sequence: Synthetic peptide
  XENP018477 vlCDR2
YASHRYT

SEQ ID NO: 20080 - protein, 9 aa, Artificial Sequence
  Description of Artificial Sequence: Synthetic peptide
  XENP018477 vlCDR3
QQDYGSPRT

SEQ ID NO: 20081 - protein, 451 aa, Artificial Sequence; identical to SEQ ID NO: 16221
  Description of Artificial Sequence: Synthetic polypeptide
  XENP018478 1G6_H1_L1.131_IgG1_PVA_/S267K Heavy Chain

SEQ ID NO: 20082 - protein, 122 aa, Artificial Sequence; identical to SEQ ID NO: 10922
  Description of Artificial Sequence: Synthetic polypeptide
  VH of XENP018478

SEQ ID NO: 20083 - protein, 5 aa, Artificial Sequence
  Description of Artificial Sequence: Synthetic peptide
  XENP018478 vhCDR1
NYWMN

SEQ ID NO: 20084 - protein, 19 aa, Artificial Sequence
  Description of Artificial Sequence: Synthetic peptide
  XENP018478 vhCDR2
EIRLKSNNYATHYAEPVKG

SEQ ID NO: 20085 - protein, 11 aa, Artificial Sequence
  Description of Artificial Sequence: Synthetic peptide
  XENP018478 vhCDR3
YYGNYGGYFDV

SEQ ID NO: 20086 - protein, 214 aa, Artificial Sequence
  Description of Artificial Sequence: Synthetic polypeptide
  XENP018478 1G6_H1_L1.131_IgG1_PVA_/S267K Light Chain
SIVMTQSPATLSVSPGERATLSCRASQSVSNDVAWYQQKPGQSPRLLINYASHRYTGVPDRFTGSGYGTEFTLTISSLQSEDFAVYFCQQDYVSPRTFGGGTKVEIKRTVAAPSVFIFPPSDEQLKSGTASVVCLLNNFYPREAKVQWKVDNALQSGNSQESVTEQDSKDSTYSLSSTLTLSKADYEKHKVYACEVTHQGLSSPVTKSFNRGEC

SEQ ID NO: 20087 - protein, 107 aa, Artificial Sequence; identical to SEQ ID NO: 14349
  Description of Artificial Sequence: Synthetic polypeptide
  VL of XENP018478

SEQ ID NO: 20088 - protein, 11 aa, Artificial Sequence
  Description of Artificial Sequence: Synthetic peptide
  XENP018478 vlCDR1
RASQSVSNDVA

SEQ ID NO: 20089 - protein, 7 aa, Artificial Sequence
  Description of Artificial Sequence: Synthetic peptide
  XENP018478 vlCDR2
YASHRYT

SEQ ID NO: 20090 - protein, 9 aa, Artificial Sequence
  Description of Artificial Sequence: Synthetic peptide
  XENP018478 vlCDR3
QQDYVSPRT

SEQ ID NO: 20091 - protein, 451 aa, Artificial Sequence; identical to SEQ ID NO: 16221
  Description of Artificial Sequence: Synthetic polypeptide
  XENP018479 1G6_H1_L1.132_IgG1_PVA_/S267K Heavy Chain

SEQ ID NO: 20092 - protein, 122 aa, Artificial Sequence; identical to SEQ ID NO: 10922
  Description of Artificial Sequence: Synthetic polypeptide
  VH of XENP018479

SEQ ID NO: 20093 - protein, 5 aa, Artificial Sequence
  Description of Artificial Sequence: Synthetic peptide
  XENP018479 vhCDR1
NYWMN

SEQ ID NO: 20094 - protein, 19 aa, Artificial Sequence
  Description of Artificial Sequence: Synthetic peptide
  XENP018479 vhCDR2
EIRLKSNNYATHYAEPVKG

SEQ ID NO: 20095 - protein, 11 aa, Artificial Sequence
  Description of Artificial Sequence: Synthetic peptide
  XENP018479 vhCDR3
YYGNYGGYFDV

SEQ ID NO: 20096 - protein, 214 aa, Artificial Sequence
  Description of Artificial Sequence: Synthetic polypeptide
  XENP018479 1G6_H1_L1.132_IgG1_PVA_/S267K Light Chain
SIVMTQSPATLSVSPGERATLSCRASQSVSNDVAWYQQKPGQSPRLLINYASHRYTGVPDRFTGSGYGTEFTLTISSLQSEDFAVYFCQQDYHSPRTFGGGTKVEIKRTVAAPSVFIFPPSDEQLKSGTASVVCLLNNFYPREAKVQWKVDNALQSGNSQESVTEQDSKDSTYSLSSTLTLSKADYEKHKVYACEVTHQGLSSPVTKSFNRGEC

SEQ ID NO: 20097 - protein, 107 aa, Artificial Sequence; identical to SEQ ID NO: 14358
  Description of Artificial Sequence: Synthetic polypeptide
  VL of XENP018479

SEQ ID NO: 20098 - protein, 11 aa, Artificial Sequence
  Description of Artificial Sequence: Synthetic peptide
  XENP018479 vlCDR1
RASQSVSNDVA

SEQ ID NO: 20099 - protein, 7 aa, Artificial Sequence
  Description of Artificial Sequence: Synthetic peptide
  XENP018479 vlCDR2
YASHRYT

SEQ ID NO: 20100 - protein, 9 aa, Artificial Sequence
  Description of Artificial Sequence: Synthetic peptide
  XENP018479 vlCDR3
QQDYHSPRT

SEQ ID NO: 20101 - protein, 451 aa, Artificial Sequence; identical to SEQ ID NO: 16221
  Description of Artificial Sequence: Synthetic polypeptide
  XENP018480 1G6_H1_L1.133_IgG1_PVA_/S267K Heavy Chain

SEQ ID NO: 20102 - protein, 122 aa, Artificial Sequence; identical to SEQ ID NO: 10922
  Description of Artificial Sequence: Synthetic polypeptide
  VH of XENP018480

SEQ ID NO: 20103 - protein, 5 aa, Artificial Sequence
  Description of Artificial Sequence: Synthetic peptide
  XENP018480 vhCDR1
NYWMN

SEQ ID NO: 20104 - protein, 19 aa, Artificial Sequence
  Description of Artificial Sequence: Synthetic peptide
  XENP018480 vhCDR2
EIRLKSNNYATHYAEPVKG

SEQ ID NO: 20105 - protein, 11 aa, Artificial Sequence
  Description of Artificial Sequence: Synthetic peptide
  XENP018480 vhCDR3
YYGNYGGYFDV

SEQ ID NO: 20106 - protein, 214 aa, Artificial Sequence
  Description of Artificial Sequence: Synthetic polypeptide
  XENP018480 1G6_H1_L1.133_IgG1_PVA_/S267K Light Chain
SIVMTQSPATLSVSPGERATLSCRASQSVSNDVAWYQQKPGQSPRLLINYASHRYTGVPDRFTGSGYGTEFTLTISSLQSEDFAVYFCQQDYDSPRTFGGGTKVEIKRTVAAPSVFIFPPSDEQLKSGTASVVCLLNNFYPREAKVQWKVDNALQSGNSQESVTEQDSKDSTYSLSSTLTLSKADYEKHKVYACEVTHQGLSSPVTKSFNRGEC

SEQ ID NO: 20107 - protein, 107 aa, Artificial Sequence; identical to SEQ ID NO: 14367
  Description of Artificial Sequence: Synthetic polypeptide
  VL of XENP018480

SEQ ID NO: 20108 - protein, 11 aa, Artificial Sequence
  Description of Artificial Sequence: Synthetic peptide
  XENP018480 vlCDR1
RASQSVSNDVA

SEQ ID NO: 20109 - protein, 7 aa, Artificial Sequence
  Description of Artificial Sequence: Synthetic peptide
  XENP018480 vlCDR2
YASHRYT

SEQ ID NO: 20110 - protein, 9 aa, Artificial Sequence
  Description of Artificial Sequence: Synthetic peptide
  XENP018480 vlCDR3
QQDYDSPRT

SEQ ID NO: 20111 - protein, 451 aa, Artificial Sequence; identical to SEQ ID NO: 16221
  Description of Artificial Sequence: Synthetic polypeptide
  XENP018481 1G6_H1_L1.134_IgG1_PVA_/S267K Heavy Chain

SEQ ID NO: 20112 - protein, 122 aa, Artificial Sequence; identical to SEQ ID NO: 10922
  Description of Artificial Sequence: Synthetic polypeptide
  VH of XENP018481

SEQ ID NO: 20113 - protein, 5 aa, Artificial Sequence
  Description of Artificial Sequence: Synthetic peptide
  XENP018481 vhCDR1
NYWMN

SEQ ID NO: 20114 - protein, 19 aa, Artificial Sequence
  Description of Artificial Sequence: Synthetic peptide
  XENP018481 vhCDR2
EIRLKSNNYATHYAEPVKG

SEQ ID NO: 20115 - protein, 11 aa, Artificial Sequence
  Description of Artificial Sequence: Synthetic peptide
  XENP018481 vhCDR3
YYGNYGGYFDV

SEQ ID NO: 20116 - protein, 214 aa, Artificial Sequence
  Description of Artificial Sequence: Synthetic polypeptide
  XENP018481 1G6_H1_L1.134_IgG1_PVA_/S267K Light Chain
SIVMTQSPATLSVSPGERATLSCRASQSVSNDVAWYQQKPGQSPRLLINYASHRYTGVPDRFTGSGYGTEFTLTISSLQSEDFAVYFCQQDYKSPRTFGGGTKVEIKRTVAAPSVFIFPPSDEQLKSGTASVVCLLNNFYPREAKVQWKVDNALQSGNSQESVTEQDSKDSTYSLSSTLTLSKADYEKHKVYACEVTHQGLSSPVTKSFNRGEC

SEQ ID NO: 20117 - protein, 107 aa, Artificial Sequence; identical to SEQ ID NO: 14376
  Description of Artificial Sequence: Synthetic polypeptide
  VL of XENP018481

SEQ ID NO: 20118 - protein, 11 aa, Artificial Sequence
  Description of Artificial Sequence: Synthetic peptide
  XENP018481 vlCDR1
RASQSVSNDVA

SEQ ID NO: 20119 - protein, 7 aa, Artificial Sequence
  Description of Artificial Sequence: Synthetic peptide
  XENP018481 vlCDR2
YASHRYT

SEQ ID NO: 20120 - protein, 9 aa, Artificial Sequence
  Description of Artificial Sequence: Synthetic peptide
  XENP018481 vlCDR3
QQDYKSPRT

SEQ ID NO: 20121 - protein, 451 aa, Artificial Sequence; identical to SEQ ID NO: 16221
  Description of Artificial Sequence: Synthetic polypeptide
  XENP018482 1G6_H1_L1.135_IgG1_PVA_/S267K Heavy Chain

SEQ ID NO: 20122 - protein, 122 aa, Artificial Sequence; identical to SEQ ID NO: 10922
  Description of Artificial Sequence: Synthetic polypeptide
  VH of XENP018482

SEQ ID NO: 20123 - protein, 5 aa, Artificial Sequence
  Description of Artificial Sequence: Synthetic peptide
  XENP018482 vhCDR1
NYWMN

SEQ ID NO: 20124 - protein, 19 aa, Artificial Sequence
  Description of Artificial Sequence: Synthetic peptide
  XENP018482 vhCDR2
EIRLKSNNYATHYAEPVKG

SEQ ID NO: 20125 - protein, 11 aa, Artificial Sequence
  Description of Artificial Sequence: Synthetic peptide
  XENP018482 vhCDR3
YYGNYGGYFDV

SEQ ID NO: 20126 - protein, 214 aa, Artificial Sequence
  Description of Artificial Sequence: Synthetic polypeptide
  XENP018482 1G6_H1_L1.135_IgG1_PVA_/S267K Light Chain
SIVMTQSPATLSVSPGERATLSCRASQSVSNDVAWYQQKPGQSPRLLINYASHRYTGVPDRFTGSGYGTEFTLTISSLQSEDFAVYFCQQDYFSPRTFGGGTKVEIKRTVAAPSVFIFPPSDEQLKSGTASVVCLLNNFYPREAKVQWKVDNALQSGNSQESVTEQDSKDSTYSLSSTLTLSKADYEKHKVYACEVTHQGLSSPVTKSFNRGEC

SEQ ID NO: 20127 - protein, 107 aa, Artificial Sequence; identical to SEQ ID NO: 14385
  Description of Artificial Sequence: Synthetic polypeptide
  VL of XENP018482

SEQ ID NO: 20128 - protein, 11 aa, Artificial Sequence
  Description of Artificial Sequence: Synthetic peptide
  XENP018482 vlCDR1
RASQSVSNDVA

SEQ ID NO: 20129 - protein, 7 aa, Artificial Sequence
  Description of Artificial Sequence: Synthetic peptide
  XENP018482 vlCDR2
YASHRYT

SEQ ID NO: 20130 - protein, 9 aa, Artificial Sequence
  Description of Artificial Sequence: Synthetic peptide
  XENP018482 vlCDR3
QQDYFSPRT

SEQ ID NO: 20131 - protein, 451 aa, Artificial Sequence; identical to SEQ ID NO: 16221
  Description of Artificial Sequence: Synthetic polypeptide
  XENP018483 1G6_H1_L1.136_IgG1_PVA_/S267K Heavy Chain

SEQ ID NO: 20132 - protein, 122 aa, Artificial Sequence; identical to SEQ ID NO: 10922
  Description of Artificial Sequence: Synthetic polypeptide
  VH of XENP018483

SEQ ID NO: 20133 - protein, 5 aa, Artificial Sequence
  Description of Artificial Sequence: Synthetic peptide
  XENP018483 vhCDR1
NYWMN

SEQ ID NO: 20134 - protein, 19 aa, Artificial Sequence
  Description of Artificial Sequence: Synthetic peptide
  XENP018483 vhCDR2
EIRLKSNNYATHYAEPVKG

SEQ ID NO: 20135 - protein, 11 aa, Artificial Sequence
  Description of Artificial Sequence: Synthetic peptide
  XENP018483 vhCDR3
YYGNYGGYFDV

SEQ ID NO: 20136 - protein, 214 aa, Artificial Sequence
  Description of Artificial Sequence: Synthetic polypeptide
  XENP018483 1G6_H1_L1.136_IgG1_PVA_/S267K Light Chain
SIVMTQSPATLSVSPGERATLSCRASQSVSNDVAWYQQKPGQSPRLLINYASHRYTGVPDRFTGSGYGTEFTLTISSLQSEDFAVYFCQQDYSTPRTFGGGTKVEIKRTVAAPSVFIFPPSDEQLKSGTASVVCLLNNFYPREAKVQWKVDNALQSGNSQESVTEQDSKDSTYSLSSTLTLSKADYEKHKVYACEVTHQGLSSPVTKSFNRGEC

SEQ ID NO: 20137 - protein, 107 aa, Artificial Sequence; identical to SEQ ID NO: 14394
  Description of Artificial Sequence: Synthetic polypeptide
  VL of XENP018483

SEQ ID NO: 20138 - protein, 11 aa, Artificial Sequence
  Description of Artificial Sequence: Synthetic peptide
  XENP018483 vlCDR1
RASQSVSNDVA

SEQ ID NO: 20139 - protein, 7 aa, Artificial Sequence
  Description of Artificial Sequence: Synthetic peptide
  XENP018483 vlCDR2
YASHRYT

SEQ ID NO: 20140 - protein, 9 aa, Artificial Sequence
  Description of Artificial Sequence: Synthetic peptide
  XENP018483 vlCDR3
QQDYSTPRT

SEQ ID NO: 20141 - protein, 451 aa, Artificial Sequence; identical to SEQ ID NO: 16221
  Description of Artificial Sequence: Synthetic polypeptide
  XENP018484 1G6_H1_L1.137_IgG1_PVA_/S267K Heavy Chain

SEQ ID NO: 20142 - protein, 122 aa, Artificial Sequence; identical to SEQ ID NO: 10922
  Description of Artificial Sequence: Synthetic polypeptide
  VH of XENP018484

SEQ ID NO: 20143 - protein, 5 aa, Artificial Sequence
  Description of Artificial Sequence: Synthetic peptide
  XENP018484 vhCDR1
NYWMN

SEQ ID NO: 20144 - protein, 19 aa, Artificial Sequence
  Description of Artificial Sequence: Synthetic peptide
  XENP018484 vhCDR2
EIRLKSNNYATHYAEPVKG

SEQ ID NO: 20145 - protein, 11 aa, Artificial Sequence
  Description of Artificial Sequence: Synthetic peptide
  XENP018484 vhCDR3
YYGNYGGYFDV

SEQ ID NO: 20146 - protein, 214 aa, Artificial Sequence
  Description of Artificial Sequence: Synthetic polypeptide
  XENP018484 1G6_H1_L1.137_IgG1_PVA_/S267K Light Chain
SIVMTQSPATLSVSPGERATLSCRASQSVSNDVAWYQQKPGQSPRLLINYASHRYTGVPDRFTGSGYGTEFTLTISSLQSEDFAVYFCQQDYSAPRTFGGGTKVEIKRTVAAPSVFIFPPSDEQLKSGTASVVCLLNNFYPREAKVQWKVDNALQSGNSQESVTEQDSKDSTYSLSSTLTLSKADYEKHKVYACEVTHQGLSSPVTKSFNRGEC

SEQ ID NO: 20147 - protein, 107 aa, Artificial Sequence; identical to SEQ ID NO: 14403
  Description of Artificial Sequence: Synthetic polypeptide
  VL of XENP018484

SEQ ID NO: 20148 - protein, 11 aa, Artificial Sequence
  Description of Artificial Sequence: Synthetic peptide
  XENP018484 vlCDR1
RASQSVSNDVA

SEQ ID NO: 20149 - protein, 7 aa, Artificial Sequence
  Description of Artificial Sequence: Synthetic peptide
  XENP018484 vlCDR2
YASHRYT

SEQ ID NO: 20150 - protein, 9 aa, Artificial Sequence
  Description of Artificial Sequence: Synthetic peptide
  XENP018484 vlCDR3
QQDYSAPRT

SEQ ID NO: 20151 - protein, 451 aa, Artificial Sequence; identical to SEQ ID NO: 16221
  Description of Artificial Sequence: Synthetic polypeptide
  XENP018485 1G6_H1_L1.138_IgG1_PVA_/S267K Heavy Chain

SEQ ID NO: 20152 - protein, 122 aa, Artificial Sequence; identical to SEQ ID NO: 10922
  Description of Artificial Sequence: Synthetic polypeptide
  VH of XENP018485

SEQ ID NO: 20153 - protein, 5 aa, Artificial Sequence
  Description of Artificial Sequence: Synthetic peptide
  XENP018485 vhCDR1
NYWMN

SEQ ID NO: 20154 - protein, 19 aa, Artificial Sequence
  Description of Artificial Sequence: Synthetic peptide
  XENP018485 vhCDR2
EIRLKSNNYATHYAEPVKG

SEQ ID NO: 20155 - protein, 11 aa, Artificial Sequence
  Description of Artificial Sequence: Synthetic peptide
  XENP018485 vhCDR3
YYGNYGGYFDV

SEQ ID NO: 20156 - protein, 214 aa, Artificial Sequence
  Description of Artificial Sequence: Synthetic polypeptide
  XENP018485 1G6_H1_L1.138_IgG1_PVA_/S267K Light Chain
SIVMTQSPATLSVSPGERATLSCRASQSVSNDVAWYQQKPGQSPRLLINYASHRYTGVPDRFTGSGYGTEFTLTISSLQSEDFAVYFCQQDYSNPRTFGGGTKVEIKRTVAAPSVFIFPPSDEQLKSGTASVVCLLNNFYPREAKVQWKVDNALQSGNSQESVTEQDSKDSTYSLSSTLTLSKADYEKHKVYACEVTHQGLSSPVTKSFNRGEC

SEQ ID NO: 20157 - protein, 107 aa, Artificial Sequence; identical to SEQ ID NO: 14412
  Description of Artificial Sequence: Synthetic polypeptide
  VL of XENP018485

SEQ ID NO: 20158 - protein, 11 aa, Artificial Sequence
  Description of Artificial Sequence: Synthetic peptide
  XENP018485 vlCDR1
RASQSVSNDVA

SEQ ID NO: 20159 - protein, 7 aa, Artificial Sequence
  Description of Artificial Sequence: Synthetic peptide
  XENP018485 vlCDR2
YASHRYT

SEQ ID NO: 20160 - protein, 9 aa, Artificial Sequence
  Description of Artificial Sequence: Synthetic peptide
  XENP018485 vlCDR3
QQDYSNPRT

SEQ ID NO: 20161 - protein, 451 aa, Artificial Sequence; identical to SEQ ID NO: 16221
  Description of Artificial Sequence: Synthetic polypeptide
  XENP018486 1G6_H1_L1.139_IgG1_PVA_/S267K Heavy Chain

SEQ ID NO: 20162 - protein, 122 aa, Artificial Sequence; identical to SEQ ID NO: 10922
  Description of Artificial Sequence: Synthetic polypeptide
  VH of XENP018486

SEQ ID NO: 20163 - protein, 5 aa, Artificial Sequence
  Description of Artificial Sequence: Synthetic peptide
  XENP018486 vhCDR1
NYWMN

SEQ ID NO: 20164 - protein, 19 aa, Artificial Sequence
  Description of Artificial Sequence: Synthetic peptide
  XENP018486 vhCDR2
EIRLKSNNYATHYAEPVKG

SEQ ID NO: 20165 - protein, 11 aa, Artificial Sequence
  Description of Artificial Sequence: Synthetic peptide
  XENP018486 vhCDR3
YYGNYGGYFDV

SEQ ID NO: 20166 - protein, 214 aa, Artificial Sequence
  Description of Artificial Sequence: Synthetic polypeptide
  XENP018486 1G6_H1_L1.139_IgG1_PVA_/S267K Light Chain
SIVMTQSPATLSVSPGERATLSCRASQSVSNDVAWYQQKPGQSPRLLINYASHRYTGVPDRFTGSGYGTEFTLTISSLQSEDFAVYFCQQDYSGPRTFGGGTKVEIKRTVAAPSVFIFPPSDEQLKSGTASVVCLLNNFYPREAKVQWKVDNALQSGNSQESVTEQDSKDSTYSLSSTLTLSKADYEKHKVYACEVTHQGLSSPVTKSFNRGEC

SEQ ID NO: 20167 - protein, 107 aa, Artificial Sequence; identical to SEQ ID NO: 14421
  Description of Artificial Sequence: Synthetic polypeptide
  VL of XENP018486

SEQ ID NO: 20168 - protein, 11 aa, Artificial Sequence
  Description of Artificial Sequence: Synthetic peptide
  XENP018486 vlCDR1
RASQSVSNDVA

SEQ ID NO: 20169 - protein, 7 aa, Artificial Sequence
  Description of Artificial Sequence: Synthetic peptide
  XENP018486 vlCDR2
YASHRYT

SEQ ID NO: 20170 - protein, 9 aa, Artificial Sequence
  Description of Artificial Sequence: Synthetic peptide
  XENP018486 vlCDR3
QQDYSGPRT

SEQ ID NO: 20171 - protein, 451 aa, Artificial Sequence; identical to SEQ ID NO: 16221
  Description of Artificial Sequence: Synthetic polypeptide
  XENP018487 1G6_H1_L1.140_IgG1_PVA_/S267K Heavy Chain

SEQ ID NO: 20172 - protein, 122 aa, Artificial Sequence; identical to SEQ ID NO: 10922
  Description of Artificial Sequence: Synthetic polypeptide
  VH of XENP018487

SEQ ID NO: 20173 - protein, 5 aa, Artificial Sequence
  Description of Artificial Sequence: Synthetic peptide
  XENP018487 vhCDR1
NYWMN

SEQ ID NO: 20174 - protein, 19 aa, Artificial Sequence
  Description of Artificial Sequence: Synthetic peptide
  XENP018487 vhCDR2
EIRLKSNNYATHYAEPVKG

SEQ ID NO: 20175 - protein, 11 aa, Artificial Sequence
  Description of Artificial Sequence: Synthetic peptide
  XENP018487 vhCDR3
YYGNYGGYFDV

SEQ ID NO: 20176 - protein, 214 aa, Artificial Sequence
  Description of Artificial Sequence: Synthetic polypeptide
  XENP018487 1G6_H1_L1.140_IgG1_PVA_/S267K Light Chain
SIVMTQSPATLSVSPGERATLSCRASQSVSNDVAWYQQKPGQSPRLLINYASHRYTGVPDRFTGSGYGTEFTLTISSLQSEDFAVYFCQQDYSVPRTFGGGTKVEIKRTVAAPSVFIFPPSDEQLKSGTASVVCLLNNFYPREAKVQWKVDNALQSGNSQESVTEQDSKDSTYSLSSTLTLSKADYEKHKVYACEVTHQGLSSPVTKSFNRGEC

SEQ ID NO: 20177 - protein, 107 aa, Artificial Sequence; identical to SEQ ID NO: 14430
  Description of Artificial Sequence: Synthetic polypeptide
  VL of XENP018487

SEQ ID NO: 20178 - protein, 11 aa, Artificial Sequence
  Description of Artificial Sequence: Synthetic peptide
  XENP018487 vlCDR1
RASQSVSNDVA

SEQ ID NO: 20179 - protein, 7 aa, Artificial Sequence
  Description of Artificial Sequence: Synthetic peptide
  XENP018487 vlCDR2
YASHRYT

SEQ ID NO: 20180 - protein, 9 aa, Artificial Sequence
  Description of Artificial Sequence: Synthetic peptide
  XENP018487 vlCDR3
QQDYSVPRT

SEQ ID NO: 20181 - protein, 451 aa, Artificial Sequence; identical to SEQ ID NO: 16221
  Description of Artificial Sequence: Synthetic polypeptide
  XENP018488 1G6_H1_L1.141_IgG1_PVA_/S267K Heavy Chain

SEQ ID NO: 20182 - protein, 122 aa, Artificial Sequence; identical to SEQ ID NO: 10922
  Description of Artificial Sequence: Synthetic polypeptide
  VH of XENP018488

SEQ ID NO: 20183 - protein, 5 aa, Artificial Sequence
  Description of Artificial Sequence: Synthetic peptide
  XENP018488 vhCDR1
NYWMN

SEQ ID NO: 20184 - protein, 19 aa, Artificial Sequence
  Description of Artificial Sequence: Synthetic peptide
  XENP018488 vhCDR2
EIRLKSNNYATHYAEPVKG

SEQ ID NO: 20185 - protein, 11 aa, Artificial Sequence
  Description of Artificial Sequence: Synthetic peptide
  XENP018488 vhCDR3
YYGNYGGYFDV

SEQ ID NO: 20186 - protein, 214 aa, Artificial Sequence
  Description of Artificial Sequence: Synthetic polypeptide
  XENP018488 1G6_H1_L1.141_IgG1_PVA_/S267K Light Chain
SIVMTQSPATLSVSPGERATLSCRASQSVSNDVAWYQQKPGQSPRLLINYASHRYTGVPDRFTGSGYGTEFTLTISSLQSEDFAVYFCQQDYSHPRTFGGGTKVEIKRTVAAPSVFIFPPSDEQLKSGTASVVCLLNNFYPREAKVQWKVDNALQSGNSQESVTEQDSKDSTYSLSSTLTLSKADYEKHKVYACEVTHQGLSSPVTKSFNRGEC

SEQ ID NO: 20187 - protein, 107 aa, Artificial Sequence; identical to SEQ ID NO: 14439
  Description of Artificial Sequence: Synthetic polypeptide
  VL of XENP018488

SEQ ID NO: 20188 - protein, 11 aa, Artificial Sequence
  Description of Artificial Sequence: Synthetic peptide
  XENP018488 vlCDR1
RASQSVSNDVA

SEQ ID NO: 20189 - protein, 7 aa, Artificial Sequence
  Description of Artificial Sequence: Synthetic peptide
  XENP018488 vlCDR2
YASHRYT

SEQ ID NO: 20190 - protein, 9 aa, Artificial Sequence
  Description of Artificial Sequence: Synthetic peptide
  XENP018488 vlCDR3
QQDYSHPRT

SEQ ID NO: 20191 - protein, 451 aa, Artificial Sequence; identical to SEQ ID NO: 16221
  Description of Artificial Sequence: Synthetic polypeptide
  XENP018489 1G6_H1_L1.142_IgG1_PVA_/S267K Heavy Chain

SEQ ID NO: 20192 - protein, 122 aa, Artificial Sequence; identical to SEQ ID NO: 10922
  Description of Artificial Sequence: Synthetic polypeptide
  VH of XENP018489

SEQ ID NO: 20193 - protein, 5 aa, Artificial Sequence
  Description of Artificial Sequence: Synthetic peptide
  XENP018489 vhCDR1
NYWMN

SEQ ID NO: 20194 - protein, 19 aa, Artificial Sequence
  Description of Artificial Sequence: Synthetic peptide
  XENP018489 vhCDR2
EIRLKSNNYATHYAEPVKG

SEQ ID NO: 20195 - protein, 11 aa, Artificial Sequence
  Description of Artificial Sequence: Synthetic peptide
  XENP018489 vhCDR3
YYGNYGGYFDV

SEQ ID NO: 20196 - protein, 214 aa, Artificial Sequence
  Description of Artificial Sequence: Synthetic polypeptide
  XENP018489 1G6_H1_L1.142_IgG1_PVA_/S267K Light Chain
SIVMTQSPATLSVSPGERATLSCRASQSVSNDVAWYQQKPGQSPRLLINYASHRYTGVPDRFTGSGYGTEFTLTISSLQSEDFAVYFCQQDYSDPRTFGGGTKVEIKRTVAAPSVFIFPPSDEQLKSGTASVVCLLNNFYPREAKVQWKVDNALQSGNSQESVTEQDSKDSTYSLSSTLTLSKADYEKHKVYACEVTHQGLSSPVTKSFNRGEC

SEQ ID NO: 20197 - protein, 107 aa, Artificial Sequence; identical to SEQ ID NO: 14448
  Description of Artificial Sequence: Synthetic polypeptide
  VL of XENP018489

SEQ ID NO: 20198 - protein, 11 aa, Artificial Sequence
  Description of Artificial Sequence: Synthetic peptide
  XENP018489 vlCDR1
RASQSVSNDVA

SEQ ID NO: 20199 - protein, 7 aa, Artificial Sequence
  Description of Artificial Sequence: Synthetic peptide
  XENP018489 vlCDR2
YASHRYT

SEQ ID NO: 20200 - protein, 9 aa, Artificial Sequence
  Description of Artificial Sequence: Synthetic peptide
  XENP018489 vlCDR3
QQDYSDPRT

SEQ ID NO: 20201 - protein, 451 aa, Artificial Sequence; identical to SEQ ID NO: 16221
  Description of Artificial Sequence: Synthetic polypeptide
  XENP018490 1G6_H1_L1.143_IgG1_PVA_/S267K Heavy Chain

SEQ ID NO: 20202 - protein, 122 aa, Artificial Sequence; identical to SEQ ID NO: 10922
  Description of Artificial Sequence: Synthetic polypeptide
  VH of XENP018490

SEQ ID NO: 20203 - protein, 5 aa, Artificial Sequence
  Description of Artificial Sequence: Synthetic peptide
  XENP018490 vhCDR1
NYWMN

SEQ ID NO: 20204 - protein, 19 aa, Artificial Sequence
  Description of Artificial Sequence: Synthetic peptide
  XENP018490 vhCDR2
EIRLKSNNYATHYAEPVKG

SEQ ID NO: 20205 - protein, 11 aa, Artificial Sequence
  Description of Artificial Sequence: Synthetic peptide
  XENP018490 vhCDR3
YYGNYGGYFDV

SEQ ID NO: 20206 - protein, 214 aa, Artificial Sequence
  Description of Artificial Sequence: Synthetic polypeptide
  XENP018490 1G6_H1_L1.143_IgG1_PVA_/S267K Light Chain
SIVMTQSPATLSVSPGERATLSCRASQSVSNDVAWYQQKPGQSPRLLINYASHRYTGVPDRFTGSGYGTEFTLTISSLQSEDFAVYFCQQDYSKPRTFGGGTKVEIKRTVAAPSVFIFPPSDEQLKSGTASVVCLLNNFYPREAKVQWKVDNALQSGNSQESVTEQDSKDSTYSLSSTLTLSKADYEKHKVYACEVTHQGLSSPVTKSFNRGEC

SEQ ID NO: 20207 - protein, 107 aa, Artificial Sequence; identical to SEQ ID NO: 14457
  Description of Artificial Sequence: Synthetic polypeptide
  VL of XENP018490

SEQ ID NO: 20208 - protein, 11 aa, Artificial Sequence
  Description of Artificial Sequence: Synthetic peptide
  XENP018490 vlCDR1
RASQSVSNDVA

SEQ ID NO: 20209 - protein, 7 aa, Artificial Sequence
  Description of Artificial Sequence: Synthetic peptide
  XENP018490 vlCDR2
YASHRYT

SEQ ID NO: 20210 - protein, 9 aa, Artificial Sequence
  Description of Artificial Sequence: Synthetic peptide
  XENP018490 vlCDR3
QQDYSKPRT

SEQ ID NO: 20211 - protein, 451 aa, Artificial Sequence; identical to SEQ ID NO: 16221
  Description of Artificial Sequence: Synthetic polypeptide
  XENP018491 1G6_H1_L1.144_IgG1_PVA_/S267K Heavy Chain

SEQ ID NO: 20212 - protein, 122 aa, Artificial Sequence; identical to SEQ ID NO: 10922
  Description of Artificial Sequence: Synthetic polypeptide
  VH of XENP018491

SEQ ID NO: 20213 - protein, 5 aa, Artificial Sequence
  Description of Artificial Sequence: Synthetic peptide
  XENP018491 vhCDR1
NYWMN

SEQ ID NO: 20214 - protein, 19 aa, Artificial Sequence
  Description of Artificial Sequence: Synthetic peptide
  XENP018491 vhCDR2
EIRLKSNNYATHYAEPVKG

SEQ ID NO: 20215 - protein, 11 aa, Artificial Sequence
  Description of Artificial Sequence: Synthetic peptide
  XENP018491 vhCDR3
YYGNYGGYFDV

SEQ ID NO: 20216 - protein, 214 aa, Artificial Sequence
  Description of Artificial Sequence: Synthetic polypeptide
  XENP018491 1G6_H1_L1.144_IgG1_PVA_/S267K Light Chain
SIVMTQSPATLSVSPGERATLSCRASQSVSNDVAWYQQKPGQSPRLLINYASHRYTGVPDRFTGSGYGTEFTLTISSLQSEDFAVYFCQQDYSFPRTFGGGTKVEIKRTVAAPSVFIFPPSDEQLKSGTASVVCLLNNFYPREAKVQWKVDNALQSGNSQESVTEQDSKDSTYSLSSTLTLSKADYEKHKVYACEVTHQGLSSPVTKSFNRGEC

SEQ ID NO: 20217 - protein, 107 aa, Artificial Sequence; identical to SEQ ID NO: 14466
  Description of Artificial Sequence: Synthetic polypeptide
  VL of XENP018491

SEQ ID NO: 20218 - protein, 11 aa, Artificial Sequence
  Description of Artificial Sequence: Synthetic peptide
  XENP018491 vlCDR1
RASQSVSNDVA

SEQ ID NO: 20219 - protein, 7 aa, Artificial Sequence
  Description of Artificial Sequence: Synthetic peptide
  XENP018491 vlCDR2
YASHRYT

SEQ ID NO: 20220 - protein, 9 aa, Artificial Sequence
  Description of Artificial Sequence: Synthetic peptide
  XENP018491 vlCDR3
QQDYSFPRT

SEQ ID NO: 20221 - protein, 451 aa, Artificial Sequence; identical to SEQ ID NO: 16221
  Description of Artificial Sequence: Synthetic polypeptide
  XENP018492 1G6_H1_L1.145_IgG1_PVA_/S267K Heavy Chain

SEQ ID NO: 20222 - protein, 122 aa, Artificial Sequence; identical to SEQ ID NO: 10922
  Description of Artificial Sequence: Synthetic polypeptide
  VH of XENP018492

SEQ ID NO: 20223 - protein, 5 aa, Artificial Sequence
  Description of Artificial Sequence: Synthetic peptide
  XENP018492 vhCDR1
NYWMN

SEQ ID NO: 20224 - protein, 19 aa, Artificial Sequence
  Description of Artificial Sequence: Synthetic peptide
  XENP018492 vhCDR2
EIRLKSNNYATHYAEPVKG

SEQ ID NO: 20225 - protein, 11 aa, Artificial Sequence
  Description of Artificial Sequence: Synthetic peptide
  XENP018492 vhCDR3
YYGNYGGYFDV

SEQ ID NO: 20226 - protein, 214 aa, Artificial Sequence
  Description of Artificial Sequence: Synthetic polypeptide
  XENP018492 1G6_H1_L1.145_IgG1_PVA_/S267K Light Chain
SIVMTQSPATLSVSPGERATLSCRASQSVSNDVAWYQQKPGQSPRLLINYASHRYTGVPDRFTGSGYGTEFTLTISSLQSEDFAVYFCQQDYSSPRTFGGGTKLEIKRTVAAPSVFIFPPSDEQLKSGTASVVCLLNNFYPREAKVQWKVDNALQSGNSQESVTEQDSKDSTYSLSSTLTLSKADYEKHKVYACEVTHQGLSSPVTKSFNRGEC

SEQ ID NO: 20227 - protein, 107 aa, Artificial Sequence; identical to SEQ ID NO: 14475
  Description of Artificial Sequence: Synthetic polypeptide
  VL of XENP018492

SEQ ID NO: 20228 - protein, 11 aa, Artificial Sequence
  Description of Artificial Sequence: Synthetic peptide
  XENP018492 vlCDR1
RASQSVSNDVA

SEQ ID NO: 20229 - protein, 7 aa, Artificial Sequence
  Description of Artificial Sequence: Synthetic peptide
  XENP018492 vlCDR2
YASHRYT

SEQ ID NO: 20230 - protein, 9 aa, Artificial Sequence
  Description of Artificial Sequence: Synthetic peptide
  XENP018492 vlCDR3
QQDYSSPRT

SEQ ID NO: 20231 - protein, 451 aa, Artificial Sequence
  Description of Artificial Sequence: Synthetic polypeptide
  XENP018892 1G6_H0L0_IgG1_PVA_/S267K Heavy Chain
EVKLEESGGGLVQPGGSMKLSCVASGFTFSNYWMNWVRQSPEKGLEWVAEIRLKSNNYATHYAESVKGRFTISRDDSKSSVYLQMNNLRAEDTGIYYCTRYYGNYGGYFDVWGAGTTVTVSSASTKGPSVFPLAPSSKSTSGGTAALGCLVKDYFPEPVTVSWNSGALTSGVHTFPAVLQSSGLYSLSSVVTVPSSSLGTQTYICNVNHKPSNTKVDKKVEPKSCDKTHTCPPCPAPPVAGPSVFLFPPKPKDTLMISRTPEVTCVVVDVKHEDPEVKFNWYVDGVEVHNAKTKPREEQYNSTYRVVSVLTVLHQDWLNGKEYKCKVSNKALPAPIEKTISKAKGQPREPQVYTLPPSREEMTKNQVSLTCLVKGFYPSDIAVEWESNGQPENNYKTTPPVLDSDGSFFLYSKLTVDKSRWQQGNVFSCSVMHEALHNHYTQKSLSLSPGK

SEQ ID NO: 20232 - protein, 122 aa, Artificial Sequence; identical to SEQ ID NO: 14483
  Description of Artificial Sequence: Synthetic polypeptide
  VH of XENP018892

SEQ ID NO: 20233 - protein, 5 aa, Artificial Sequence
  Description of Artificial Sequence: Synthetic peptide
  XENP018892 vhCDR1
NYWMN

SEQ ID NO: 20234 - protein, 19 aa, Artificial Sequence
  Description of Artificial Sequence: Synthetic peptide
  XENP018892 vhCDR2
EIRLKSNNYATHYAESVKG

SEQ ID NO: 20235 - protein, 11 aa, Artificial Sequence
  Description of Artificial Sequence: Synthetic peptide
  XENP018892 vhCDR3
YYGNYGGYFDV

SEQ ID NO: 20236 - protein, 214 aa, Artificial Sequence
  Description of Artificial Sequence: Synthetic polypeptide
  XENP018892 1G6_H0L0_IgG1_PVA_/S267K Light Chain
SIVMTQTPKFLLVSAGDRVTITCKASQSVSNDVAWYQQKPGQSPKLLINYASHRYTGVPDRFTGSGYGTDFTFTISTVQAEDLAVYFCQQDYSSPRTFGGGTKLEIKRTVAAPSVFIFPPSDEQLKSGTASVVCLLNNFYPREAKVQWKVDNALQSGNSQESVTEQDSKDSTYSLSSTLTLSKADYEKHKVYACEVTHQGLSSPVTKSFNRGEC

SEQ ID NO: 20237 - protein, 107 aa, Artificial Sequence; identical to SEQ ID NO: 14484
  Description of Artificial Sequence: Synthetic polypeptide
  VL of XENP018892

SEQ ID NO: 20238 - protein, 11 aa, Artificial Sequence
  Description of Artificial Sequence: Synthetic peptide
  XENP018892 vlCDR1
KASQSVSNDVA

SEQ ID NO: 20239 - protein, 7 aa, Artificial Sequence
  Description of Artificial Sequence: Synthetic peptide
  XENP018892 vlCDR2
YASHRYT

SEQ ID NO: 20240 - protein, 9 aa, Artificial Sequence
  Description of Artificial Sequence: Synthetic peptide
  XENP018892 vlCDR3
QQDYSSPRT

SEQ ID NO: 20241 - protein, 449 aa, Artificial Sequence
  Description of Artificial Sequence: Synthetic polypeptide
  XENP018893 4C11_H0L0_IgG1_PVA_/S267K Heavy Chain
EIHLQQSGTVLAKPGASVKMSCTASGYTFTSYWMHWVKQRPGQGLEWIGAIYPGNSDTSYNQKFKGKAKLTAVTSASTAYMELSSLTNEDSAVYYCTNLYYGSSFAMDYWGQGTSVTVSSASTKGPSVFPLAPSSKSTSGGTAALGCLVKDYFPEPVTVSWNSGALTSGVHTFPAVLQSSGLYSLSSVVTVPSSSLGTQTYICNVNHKPSNTKVDKKVEPKSCDKTHTCPPCPAPPVAGPSVFLFPPKPKDTLMISRTPEVTCVVVDVKHEDPEVKFNWYVDGVEVHNAKTKPREEQYNSTYRVVSVLTVLHQDWLNGKEYKCKVSNKALPAPIEKTISKAKGQPREPQVYTLPPSREEMTKNQVSLTCLVKGFYPSDIAVEWESNGQPENNYKTTPPVLDSDGSFFLYSKLTVDKSRWQQGNVFSCSVMHEALHNHYTQKSLSLSPGK

SEQ ID NO: 20242 - protein, 120 aa, Artificial Sequence
  Description of Artificial Sequence: Synthetic polypeptide
  VH of XENP018893
EIHLQQSGTVLAKPGASVKMSCTASGYTFTSYWMHWVKQRPGQGLEWIGAIYPGNSDTSYNQKFKGKAKLTAVTSASTAYMELSSLTNEDSAVYYCTNLYYGSSFAMDYWGQGTSVTVSS

SEQ ID NO: 20243 - protein, 5 aa, Artificial Sequence
  Description of Artificial Sequence: Synthetic peptide
  XENP018893 vhCDR1
SYWMH

SEQ ID NO: 20244 - protein, 17 aa, Artificial Sequence
  Description of Artificial Sequence: Synthetic peptide
  XENP018893 vhCDR2
AIYPGNSDTSYNQKFKG

SEQ ID NO: 20245 - protein, 11 aa, Artificial Sequence
  Description of Artificial Sequence: Synthetic peptide
  XENP018893 vhCDR3
LYYGSSFAMDY

SEQ ID NO: 20246 - protein, 214 aa, Artificial Sequence
  Description of Artificial Sequence: Synthetic polypeptide
  XENP018893 4C11_H0L0_IgG1_PVA_/S267K Light Chain
DIKMTQSPSSIYASLGERVTVTCRASQDINTYLSWFQQLPGKSPKTLIYRANRLVDGVPSRFSGSGSGQDYSLTISSLEYEDMGIYYCLHYDDFPYTFGGGTKLEIKRTVAAPSVFIFPPSDEQLKSGTASVVCLLNNFYPREAKVQWKVDNALQSGNSQESVTEQDSKDSTYSLSSTLTLSKADYEKHKVYACEVTHQGLSSPVTKSFNRGEC

SEQ ID NO: 20247 - protein, 107 aa, Artificial Sequence
  Description of Artificial Sequence: Synthetic polypeptide
  VL of XENP018893
DIKMTQSPSSIYASLGERVTVTCRASQDINTYLSWFQQLPGKSPKTLIYRANRLVDGVPSRFSGSGSGQDYSLTISSLEYEDMGIYYCLHYDDFPYTFGGGTKLEIK

SEQ ID NO: 20248 - protein, 11 aa, Artificial Sequence
  Description of Artificial Sequence: Synthetic peptide
  XENP018893 vlCDR1
RASQDINTYLS

SEQ ID NO: 20249 - protein, 7 aa, Artificial Sequence
  Description of Artificial Sequence: Synthetic peptide
  XENP018893 vlCDR2
RANRLVD

SEQ ID NO: 20250 - protein, 9 aa, Artificial Sequence
  Description of Artificial Sequence: Synthetic peptide
  XENP018893 vlCDR3
LHYDDFPYT

SEQ ID NO: 20251 - protein, 446 aa, Artificial Sequence
  Description of Artificial Sequence: Synthetic polypeptide
  XENP018894 6A3_H0L0_IgG1_PVA_/S267K Heavy Chain
EVKLVESGGGLVKPGGSLKLSCAASGFTFSSYGMSWVRQTPEKRLEWVATISGGGRYTYYPDSVKGRFTISRDNAKNNLYLQMSSLRSEDTALYYCASYYDSSFDYWGQGTTLTVSSASTKGPSVFPLAPSSKSTSGGTAALGCLVKDYFPEPVTVSWNSGALTSGVHTFPAVLQSSGLYSLSSVVTVPSSSLGTQTYICNVNHKPSNTKVDKKVEPKSCDKTHTCPPCPAPPVAGPSVFLFPPKPKDTLMISRTPEVTCVVVDVKHEDPEVKFNWYVDGVEVHNAKTKPREEQYNSTYRVVSVLTVLHQDWLNGKEYKCKVSNKALPAPIEKTISKAKGQPREPQVYTLPPSREEMTKNQVSLTCLVKGFYPSDIAVEWESNGQPENNYKTTPPVLDSDGSFFLYSKLTVDKSRWQQGNVFSCSVMHEALHNHYTQKSLSLSPGK

SEQ ID NO: 20252 - protein, 117 aa, Artificial Sequence; identical to SEQ ID NO: 14501
  Description of Artificial Sequence: Synthetic polypeptide
  VH of XENP018894

SEQ ID NO: 20253 - protein, 5 aa, Artificial Sequence
  Description of Artificial Sequence: Synthetic peptide
  XENP018894 vhCDR1
SYGMS

SEQ ID NO: 20254 - protein, 17 aa, Artificial Sequence
  Description of Artificial Sequence: Synthetic peptide
  XENP018894 vhCDR2
TISGGGRYTYYPDSVKG

SEQ ID NO: 20255 - protein, 8 aa, Artificial Sequence
  Description of Artificial Sequence: Synthetic peptide
  XENP018894 vhCDR3
YYDSSFDY

SEQ ID NO: 20256 - protein, 214 aa, Artificial Sequence
  Description of Artificial Sequence: Synthetic polypeptide
  XENP018894 6A3_H0L0_IgG1_PVA_/S267K Light Chain
DIVMTQSHKFMSTSVGDRVSITCKASQDVGTAVAWYQQKPGQSPKLLIYWASTRHTGVPDRFTGSGSGTDFTLTISNVQSEDLADYFCQHYSIYPWTFGGGTKLEIKRTVAAPSVFIFPPSDEQLKSGTASVVCLLNNFYPREAKVQWKVDNALQSGNSQESVTEQDSKDSTYSLSSTLTLSKADYEKHKVYACEVTHQGLSSPVTKSFNRGEC

SEQ ID NO: 20257 - protein, 107 aa, Artificial Sequence; identical to SEQ ID NO: 14502
  Description of Artificial Sequence: Synthetic polypeptide
  VL of XENP018894

SEQ ID NO: 20258 - protein, 11 aa, Artificial Sequence
  Description of Artificial Sequence: Synthetic peptide
  XENP018894 vlCDR1
KASQDVGTAVA

SEQ ID NO: 20259 - protein, 7 aa, Artificial Sequence
  Description of Artificial Sequence: Synthetic peptide
  XENP018894 vlCDR2
WASTRHT

SEQ ID NO: 20260 - protein, 9 aa, Artificial Sequence
  Description of Artificial Sequence: Synthetic peptide
  XENP018894 vlCDR3
QHYSIYPWT

SEQ ID NO: 20261 - protein, 451 aa, Artificial Sequence; identical to SEQ ID NO: 17291
  Description of Artificial Sequence: Synthetic polypeptide
  XENP018910 1G6_H1.90_L1.119_IgG1_PVA_/S267K Heavy Chain

SEQ ID NO: 20262 - protein, 122 aa, Artificial Sequence; identical to SEQ ID NO: 11837
  Description of Artificial Sequence: Synthetic polypeptide
  VH of XENP018910

SEQ ID NO: 20263 - protein, 5 aa, Artificial Sequence
  Description of Artificial Sequence: Synthetic peptide
  XENP018910 vhCDR1
NYWMN

SEQ ID NO: 20264 - protein, 19 aa, Artificial Sequence
  Description of Artificial Sequence: Synthetic peptide
  XENP018910 vhCDR2
EIRLYSNNYATHYAEPVKG

SEQ ID NO: 20265 - protein, 11 aa, Artificial Sequence
  Description of Artificial Sequence: Synthetic peptide
  XENP018910 vhCDR3
YYGNYGGYFDV

SEQ ID NO: 20266 - protein, 214 aa, Artificial Sequence; identical to SEQ ID NO: 19966
  Description of Artificial Sequence: Synthetic polypeptide
  XENP018910 1G6_H1.90_L1.119_IgG1_PVA_/S267K Light Chain

SEQ ID NO: 20267 - protein, 107 aa, Artificial Sequence; identical to SEQ ID NO: 14241
  Description of Artificial Sequence: Synthetic polypeptide
  VL of XENP018910

SEQ ID NO: 20268 - protein, 11 aa, Artificial Sequence
  Description of Artificial Sequence: Synthetic peptide
  XENP018910 vlCDR1
RASQSVSNDVA

SEQ ID NO: 20269 - protein, 7 aa, Artificial Sequence
  Description of Artificial Sequence: Synthetic peptide
  XENP018910 vlCDR2
YASHRYT

SEQ ID NO: 20270 - protein, 9 aa, Artificial Sequence
  Description of Artificial Sequence: Synthetic peptide
  XENP018910 vlCDR3
QQDWSSPRT

SEQ ID NO: 20271 - protein, 451 aa, Artificial Sequence; identical to SEQ ID NO: 17291
  Description of Artificial Sequence: Synthetic polypeptide
  XENP018911 1G6_H1.90_L1.23_IgG1_PVA_/S267K Heavy Chain

SEQ ID NO: 20272 - protein, 122 aa, Artificial Sequence; identical to SEQ ID NO: 11837
  Description of Artificial Sequence: Synthetic polypeptide
  VH of XENP018911

SEQ ID NO: 20273 - protein, 5 aa, Artificial Sequence
  Description of Artificial Sequence: Synthetic peptide
  XENP018911 vhCDR1
NYWMN

SEQ ID NO: 20274 - protein, 19 aa, Artificial Sequence
  Description of Artificial Sequence: Synthetic peptide
  XENP018911 vhCDR2
EIRLYSNNYATHYAEPVKG

SEQ ID NO: 20275 - protein, 11 aa, Artificial Sequence
  Description of Artificial Sequence: Synthetic peptide
  XENP018911 vhCDR3
YYGNYGGYFDV

SEQ ID NO: 20276 - protein, 214 aa, Artificial Sequence; identical to SEQ ID NO: 19006
  Description of Artificial Sequence: Synthetic polypeptide
  XENP018911 1G6_H1.90_L1.23_IgG1_PVA_/S267K Light Chain

SEQ ID NO: 20277 - protein, 107 aa, Artificial Sequence; identical to SEQ ID NO: 13377
  Description of Artificial Sequence: Synthetic polypeptide
  VL of XENP018911

SEQ ID NO: 20278 - protein, 11 aa, Artificial Sequence
  Description of Artificial Sequence: Synthetic peptide
  XENP018911 vlCDR1
RASQSVGNDVA

SEQ ID NO: 20279 - protein, 7 aa, Artificial Sequence
  Description of Artificial Sequence: Synthetic peptide
  XENP018911 vlCDR2
YASHRYT

SEQ ID NO: 20280 - protein, 9 aa, Artificial Sequence
  Description of Artificial Sequence: Synthetic peptide
  XENP018911 vlCDR3
QQDYSSPRT

SEQ ID NO: 20281 - protein, 451 aa, Artificial Sequence; identical to SEQ ID NO: 17291
  Description of Artificial Sequence: Synthetic polypeptide
  XENP018912 1G6_H1.90_L1.67_IgG1_PVA_/S267K Heavy Chain

SEQ ID NO: 20282 - protein, 122 aa, Artificial Sequence; identical to SEQ ID NO: 11837
  Description of Artificial Sequence: Synthetic polypeptide
  VH of XENP018912

SEQ ID NO: 20283 - protein, 5 aa, Artificial Sequence
  Description of Artificial Sequence: Synthetic peptide
  XENP018912 vhCDR1
NYWMN

SEQ ID NO: 20284 - protein, 19 aa, Artificial Sequence
  Description of Artificial Sequence: Synthetic peptide
  XENP018912 vhCDR2
EIRLYSNNYATHYAEPVKG

SEQ ID NO: 20285 - protein, 11 aa, Artificial Sequence
  Description of Artificial Sequence: Synthetic peptide
  XENP018912 vhCDR3
YYGNYGGYFDV

SEQ ID NO: 20286 - protein, 214 aa, Artificial Sequence; identical to SEQ ID NO: 19446
  Description of Artificial Sequence: Synthetic polypeptide
  XENP018912 1G6_H1.90_L1.67_IgG1_PVA_/S267K Light Chain

SEQ ID NO: 20287 - protein, 107 aa, Artificial Sequence; identical to SEQ ID NO: 13773
  Description of Artificial Sequence: Synthetic polypeptide
  VL of XENP018912

SEQ ID NO: 20288 - protein, 11 aa, Artificial Sequence
  Description of Artificial Sequence: Synthetic peptide
  XENP018912 vlCDR1
RASQSVSNDVA

SEQ ID NO: 20289 - protein, 7 aa, Artificial Sequence
  Description of Artificial Sequence: Synthetic peptide
  XENP018912 vlCDR2
YASWRYT

SEQ ID NO: 20290 - protein, 9 aa, Artificial Sequence
  Description of Artificial Sequence: Synthetic peptide
  XENP018912 vlCDR3
QQDYSSPRT

SEQ ID NO: 20291 - protein, 451 aa, Artificial Sequence; identical to SEQ ID NO: 17291
  Description of Artificial Sequence: Synthetic polypeptide
  XENP018913 1G6_H1.90_L1.94_IgG1_PVA_/S267K Heavy Chain

SEQ ID NO: 20292 - protein, 122 aa, Artificial Sequence; identical to SEQ ID NO: 11837
  Description of Artificial Sequence: Synthetic polypeptide
  VH of XENP018913

SEQ ID NO: 20293 - protein, 5 aa, Artificial Sequence
  Description of Artificial Sequence: Synthetic peptide
  XENP018913 vhCDR1
NYWMN

SEQ ID NO: 20294 - protein, 19 aa, Artificial Sequence
  Description of Artificial Sequence: Synthetic peptide
  XENP018913 vhCDR2
EIRLYSNNYATHYAEPVKG

SEQ ID NO: 20295 - protein, 11 aa, Artificial Sequence
  Description of Artificial Sequence: Synthetic peptide
  XENP018913 vhCDR3
YYGNYGGYFDV

SEQ ID NO: 20296 - protein, 214 aa, Artificial Sequence; identical to SEQ ID NO: 19716
  Description of Artificial Sequence: Synthetic polypeptide
  XENP018913 1G6_H1.90_L1.94_IgG1_PVA_/S267K Light Chain

SEQ ID NO: 20297 - protein, 107 aa, Artificial Sequence; identical to SEQ ID NO: 14016
  Description of Artificial Sequence: Synthetic polypeptide
  VL of XENP018913

SEQ ID NO: 20298 - protein, 11 aa, Artificial Sequence
  Description of Artificial Sequence: Synthetic peptide
  XENP018913 vlCDR1
RASQSVSNDVA

SEQ ID NO: 20299 - protein, 7 aa, Artificial Sequence
  Description of Artificial Sequence: Synthetic peptide
  XENP018913 vlCDR2
YASHRYT

SEQ ID NO: 20300 - protein, 9 aa, Artificial Sequence
  Description of Artificial Sequence: Synthetic peptide
  XENP018913 vlCDR3
QQDYSSPRT

SEQ ID NO: 20301 - protein, 451 aa, Artificial Sequence; identical to SEQ ID NO: 17291
  Description of Artificial Sequence: Synthetic polypeptide
  XENP018914 1G6_H1.90_L1.116_IgG1_PVA_/S267K Heavy Chain

SEQ ID NO: 20302 - protein, 122 aa, Artificial Sequence; identical to SEQ ID NO: 11837
  Description of Artificial Sequence: Synthetic polypeptide
  VH of XENP018914

SEQ ID NO: 20303 - protein, 5 aa, Artificial Sequence
  Description of Artificial Sequence: Synthetic peptide
  XENP018914 vhCDR1
NYWMN

SEQ ID NO: 20304 - protein, 19 aa, Artificial Sequence
  Description of Artificial Sequence: Synthetic peptide
  XENP018914 vhCDR2
EIRLYSNNYATHYAEPVKG

SEQ ID NO: 20305 - protein, 11 aa, Artificial Sequence
  Description of Artificial Sequence: Synthetic peptide
  XENP018914 vhCDR3
YYGNYGGYFDV

SEQ ID NO: 20306 - protein, 214 aa, Artificial Sequence; identical to SEQ ID NO: 19936
  Description of Artificial Sequence: Synthetic polypeptide
  XENP018914 1G6_H1.90_L1.116_IgG1_PVA_/S267K Light Chain

SEQ ID NO: 20307 - protein, 107 aa, Artificial Sequence; identical to SEQ ID NO: 14214
  Description of Artificial Sequence: Synthetic polypeptide
  VL of XENP018914

SEQ ID NO: 20308 - protein, 11 aa, Artificial Sequence
  Description of Artificial Sequence: Synthetic peptide
  XENP018914 vlCDR1
RASQSVSNDVA

SEQ ID NO: 20309 - protein, 7 aa, Artificial Sequence
  Description of Artificial Sequence: Synthetic peptide
  XENP018914 vlCDR2
YASHRYT

SEQ ID NO: 20310 - protein, 9 aa, Artificial Sequence
  Description of Artificial Sequence: Synthetic peptide
  XENP018914 vlCDR3
QQDFSSPRT

SEQ ID NO: 20311 - protein, 451 aa, Artificial Sequence; identical to SEQ ID NO: 17941
  Description of Artificial Sequence: Synthetic polypeptide
  XENP018915 1G6_H1.155_L1.119_IgG1_PVA_/S267K Heavy Chain

SEQ ID NO: 20312 - protein, 122 aa, Artificial Sequence; identical to SEQ ID NO: 12422
  Description of Artificial Sequence: Synthetic polypeptide
  VH of XENP018915

SEQ ID NO: 20313 - protein, 5 aa, Artificial Sequence
  Description of Artificial Sequence: Synthetic peptide
  XENP018915 vhCDR1
NYWMN

SEQ ID NO: 20314 - protein, 19 aa, Artificial Sequence
  Description of Artificial Sequence: Synthetic peptide
  XENP018915 vhCDR2
EIRLKSNNYATHYAEPVKG

SEQ ID NO: 20315 - protein, 11 aa, Artificial Sequence
  Description of Artificial Sequence: Synthetic peptide
  XENP018915 vhCDR3
YYGNYGGYFDV

SEQ ID NO: 20316 - protein, 214 aa, Artificial Sequence; identical to SEQ ID NO: 19966
  Description of Artificial Sequence: Synthetic polypeptide
  XENP018915 1G6_H1.155_L1.119_IgG1_PVA_/S267K Light Chain

SEQ ID NO: 20317 - protein, 107 aa, Artificial Sequence; identical to SEQ ID NO: 14241
  Description of Artificial Sequence: Synthetic polypeptide
  VL of XENP018915

SEQ ID NO: 20318 - protein, 11 aa, Artificial Sequence
  Description of Artificial Sequence: Synthetic peptide
  XENP018915 vlCDR1
RASQSVSNDVA

SEQ ID NO: 20319 - protein, 7 aa, Artificial Sequence
  Description of Artificial Sequence: Synthetic peptide
  XENP018915 vlCDR2
YASHRYT

SEQ ID NO: 20320 - protein, 9 aa, Artificial Sequence
  Description of Artificial Sequence: Synthetic peptide
  XENP018915 vlCDR3
QQDWSSPRT

SEQ ID NO: 20321 - protein, 451 aa, Artificial Sequence
  Description of Artificial Sequence: Synthetic polypeptide
  XENP018980 1G6_H1.239_L1_IgG1_PVA_/S267K Heavy Chain
EVQLKESGGGLVKPGGSLRLSCAASGFTFSNYWMNWVRQAPGKGLEWVGEIRLKSNNYATHYAEPVKGRFTISRDDSKSTVYLQMNSLKTEDTAVYYCTRYYGNYGGYFDVWGAGTLVTVSSASTKGPSVFPLAPSSKSTSGGTAALGCLVKDYFPEPVTVSWNSGALTSGVHTFPAVLQSSGLYSLSSVVTVPSSSLGTQTYICNVNHKPSNTKVDKKVEPKSCDKTHTCPPCPAPPVAGPSVFLFPPKPKDTLMISRTPEVTCVVVDVKHEDPEVKFNWYVDGVEVHNAKTKPREEQYNSTYRVVSVLTVLHQDWLNGKEYKCKVSNKALPAPIEKTISKAKGQPREPQVYTLPPSREEMTKNQVSLTCLVKGFYPSDIAVEWESNGQPENNYKTTPPVLDSDGSFFLYSKLTVDKSRWQQGNVFSCSVMHEALHNHYTQKSLSLSPGK

SEQ ID NO: 20322 - protein, 122 aa, Artificial Sequence; identical to SEQ ID NO: 14681
  Description of Artificial Sequence: Synthetic polypeptide
  VH of XENP018980

SEQ ID NO: 20323 - protein, 5 aa, Artificial Sequence
  Description of Artificial Sequence: Synthetic peptide
  XENP018980 vhCDR1
NYWMN

SEQ ID NO: 20324 - protein, 19 aa, Artificial Sequence
  Description of Artificial Sequence: Synthetic peptide
  XENP018980 vhCDR2
EIRLKSNNYATHYAEPVKG

SEQ ID NO: 20325 - protein, 11 aa, Artificial Sequence
  Description of Artificial Sequence: Synthetic peptide
  XENP018980 vhCDR3
YYGNYGGYFDV

SEQ ID NO: 20326 - protein, 214 aa, Artificial Sequence; identical to SEQ ID NO: 16226
  Description of Artificial Sequence: Synthetic polypeptide
  XENP018980 1G6_H1.239_L1_IgG1_PVA_/S267K Light Chain

SEQ ID NO: 20327 - protein, 107 aa, Artificial Sequence; identical to SEQ ID NO: 10923
  Description of Artificial Sequence: Synthetic polypeptide
  VL of XENP018980

SEQ ID NO: 20328 - protein, 11 aa, Artificial Sequence
  Description of Artificial Sequence: Synthetic peptide
  XENP018980 vlCDR1
RASQSVSNDVA

SEQ ID NO: 20329 - protein, 7 aa, Artificial Sequence
  Description of Artificial Sequence: Synthetic peptide
  XENP018980 vlCDR2
YASHRYT

SEQ ID NO: 20330 - protein, 9 aa, Artificial Sequence
  Description of Artificial Sequence: Synthetic peptide
  XENP018980 vlCDR3
QQDYSSPRT

SEQ ID NO: 20331 - protein, 451 aa, Artificial Sequence
  Description of Artificial Sequence: Synthetic polypeptide
  XENP018981 1G6_H1.240_L1_IgG1_PVA_/S267K Heavy Chain
EVQLVESGGGLVKPGESLRLSCAASGFTFSNYWMNWVRQAPGKGLEWVGEIRLKSNNYATHYAEPVKGRFTISRDDSKSTVYLQMNSLKTEDTAVYYCTRYYGNYGGYFDVWGAGTLVTVSSASTKGPSVFPLAPSSKSTSGGTAALGCLVKDYFPEPVTVSWNSGALTSGVHTFPAVLQSSGLYSLSSVVTVPSSSLGTQTYICNVNHKPSNTKVDKKVEPKSCDKTHTCPPCPAPPVAGPSVFLFPPKPKDTLMISRTPEVTCVVVDVKHEDPEVKFNWYVDGVEVHNAKTKPREEQYNSTYRVVSVLTVLHQDWLNGKEYKCKVSNKALPAPIEKTISKAKGQPREPQVYTLPPSREEMTKNQVSLTCLVKGFYPSDIAVEWESNGQPENNYKTTPPVLDSDGSFFLYSKLTVDKSRWQQGNVFSCSVMHEALHNHYTQKSLSLSPGK

SEQ ID NO: 20332 - protein, 122 aa, Artificial Sequence; identical to SEQ ID NO: 14690
  Description of Artificial Sequence: Synthetic polypeptide
  VH of XENP018981

SEQ ID NO: 20333 - protein, 5 aa, Artificial Sequence
  Description of Artificial Sequence: Synthetic peptide
  XENP018981 vhCDR1
NYWMN

SEQ ID NO: 20334 - protein, 19 aa, Artificial Sequence
  Description of Artificial Sequence: Synthetic peptide
  XENP018981 vhCDR2
EIRLKSNNYATHYAEPVKG

SEQ ID NO: 20335 - protein, 11 aa, Artificial Sequence
  Description of Artificial Sequence: Synthetic peptide
  XENP018981 vhCDR3
YYGNYGGYFDV

SEQ ID NO: 20336 - protein, 214 aa, Artificial Sequence; identical to SEQ ID NO: 16226
  Description of Artificial Sequence: Synthetic polypeptide
  XENP018981 1G6_H1.240_L1_IgG1_PVA_/S267K Light Chain

SEQ ID NO: 20337 - protein, 107 aa, Artificial Sequence; identical to SEQ ID NO: 10923
  Description of Artificial Sequence: Synthetic polypeptide
  VL of XENP018981

SEQ ID NO: 20338 - protein, 11 aa, Artificial Sequence
  Description of Artificial Sequence: Synthetic peptide
  XENP018981 vlCDR1
RASQSVSNDVA

SEQ ID NO: 20339 - protein, 7 aa, Artificial Sequence
  Description of Artificial Sequence: Synthetic peptide
  XENP018981 vlCDR2
YASHRYT

SEQ ID NO: 20340 - protein, 9 aa, Artificial Sequence
  Description of Artificial Sequence: Synthetic peptide
  XENP018981 vlCDR3
QQDYSSPRT

SEQ ID NO: 20341 - protein, 451 aa, Artificial Sequence
  Description of Artificial Sequence: Synthetic polypeptide
  XENP018982 1G6_H1.241_L1_IgG1_PVA_/S267K Heavy Chain
EVQLVESGGGLVKPGGSLRLTCAASGFTFSNYWMNWVRQAPGKGLEWVGEIRLKSNNYATHYAEPVKGRFTISRDDSKSTVYLQMNSLKTEDTAVYYCTRYYGNYGGYFDVWGAGTLVTVSSASTKGPSVFPLAPSSKSTSGGTAALGCLVKDYFPEPVTVSWNSGALTSGVHTFPAVLQSSGLYSLSSVVTVPSSSLGTQTYICNVNHKPSNTKVDKKVEPKSCDKTHTCPPCPAPPVAGPSVFLFPPKPKDTLMISRTPEVTCVVVDVKHEDPEVKFNWYVDGVEVHNAKTKPREEQYNSTYRVVSVLTVLHQDWLNGKEYKCKVSNKALPAPIEKTISKAKGQPREPQVYTLPPSREEMTKNQVSLTCLVKGFYPSDIAVEWESNGQPENNYKTTPPVLDSDGSFFLYSKLTVDKSRWQQGNVFSCSVMHEALHNHYTQKSLSLSPGK

SEQ ID NO: 20342 - protein, 122 aa, Artificial Sequence; identical to SEQ ID NO: 14699
  Description of Artificial Sequence: Synthetic polypeptide
  VH of XENP018982

SEQ ID NO: 20343 - protein, 5 aa, Artificial Sequence
  Description of Artificial Sequence: Synthetic peptide
  XENP018982 vhCDR1
NYWMN

SEQ ID NO: 20344 - protein, 19 aa, Artificial Sequence
  Description of Artificial Sequence: Synthetic peptide
  XENP018982 vhCDR2
EIRLKSNNYATHYAEPVKG

SEQ ID NO: 20345 - protein, 11 aa, Artificial Sequence
  Description of Artificial Sequence: Synthetic peptide
  XENP018982 vhCDR3
YYGNYGGYFDV

SEQ ID NO: 20346 - protein, 214 aa, Artificial Sequence; identical to SEQ ID NO: 16226
  Description of Artificial Sequence: Synthetic polypeptide
  XENP018982 1G6_H1.241_L1_IgG1_PVA_/S267K Light Chain

SEQ ID NO: 20347 - protein, 107 aa, Artificial Sequence; identical to SEQ ID NO: 10923
  Description of Artificial Sequence: Synthetic polypeptide
  VL of XENP018982

SEQ ID NO: 20348 - protein, 11 aa, Artificial Sequence
  Description of Artificial Sequence: Synthetic peptide
  XENP018982 vlCDR1
RASQSVSNDVA

SEQ ID NO: 20349 - protein, 7 aa, Artificial Sequence
  Description of Artificial Sequence: Synthetic peptide
  XENP018982 vlCDR2
YASHRYT

SEQ ID NO: 20350 - protein, 9 aa, Artificial Sequence
  Description of Artificial Sequence: Synthetic peptide
  XENP018982 vlCDR3
QQDYSSPRT

SEQ ID NO: 20351 - protein, 451 aa, Artificial Sequence
  Description of Artificial Sequence: Synthetic polypeptide
  XENP018983 1G6_H1.242_L1_IgG1_PVA_/S267K Heavy Chain
EVQLVESGGGLVKPGGSLRLVCAASGFTFSNYWMNWVRQAPGKGLEWVGEIRLKSNNYATHYAEPVKGRFTISRDDSKSTVYLQMNSLKTEDTAVYYCTRYYGNYGGYFDVWGAGTLVTVSSASTKGPSVFPLAPSSKSTSGGTAALGCLVKDYFPEPVTVSWNSGALTSGVHTFPAVLQSSGLYSLSSVVTVPSSSLGTQTYICNVNHKPSNTKVDKKVEPKSCDKTHTCPPCPAPPVAGPSVFLFPPKPKDTLMISRTPEVTCVVVDVKHEDPEVKFNWYVDGVEVHNAKTKPREEQYNSTYRVVSVLTVLHQDWLNGKEYKCKVSNKALPAPIEKTISKAKGQPREPQVYTLPPSREEMTKNQVSLTCLVKGFYPSDIAVEWESNGQPENNYKTTPPVLDSDGSFFLYSKLTVDKSRWQQGNVFSCSVMHEALHNHYTQKSLSLSPGK

SEQ ID NO: 20352 - protein, 122 aa, Artificial Sequence; identical to SEQ ID NO: 14708
  Description of Artificial Sequence: Synthetic polypeptide
  VH of XENP018983

SEQ ID NO: 20353 - protein, 5 aa, Artificial Sequence
  Description of Artificial Sequence: Synthetic peptide
  XENP018983 vhCDR1
NYWMN

SEQ ID NO: 20354 - protein, 19 aa, Artificial Sequence
  Description of Artificial Sequence: Synthetic peptide
  XENP018983 vhCDR2
EIRLKSNNYATHYAEPVKG

SEQ ID NO: 20355 - protein, 11 aa, Artificial Sequence
  Description of Artificial Sequence: Synthetic peptide
  XENP018983 vhCDR3
YYGNYGGYFDV

SEQ ID NO: 20356 - protein, 214 aa, Artificial Sequence; identical to SEQ ID NO: 16226
  Description of Artificial Sequence: Synthetic polypeptide
  XENP018983 1G6_H1.242_L1_IgG1_PVA_/S267K Light Chain

SEQ ID NO: 20357 - protein, 107 aa, Artificial Sequence; identical to SEQ ID NO: 10923
  Description of Artificial Sequence: Synthetic polypeptide
  VL of XENP018983

SEQ ID NO: 20358 - protein, 11 aa, Artificial Sequence
  Description of Artificial Sequence: Synthetic peptide
  XENP018983 vlCDR1
RASQSVSNDVA

SEQ ID NO: 20359 - protein, 7 aa, Artificial Sequence
  Description of Artificial Sequence: Synthetic peptide
  XENP018983 vlCDR2
YASHRYT

SEQ ID NO: 20360 - protein, 9 aa, Artificial Sequence
  Description of Artificial Sequence: Synthetic peptide
  XENP018983 vlCDR3
QQDYSSPRT

SEQ ID NO: 20361 - protein, 451 aa, Artificial Sequence
  Description of Artificial Sequence: Synthetic polypeptide
  XENP018984 1G6_H1.243_L1_IgG1_PVA_/S267K Heavy Chain
EVQLVESGGGLVKPGGSLRLSCAASGFTLSNYWMNWVRQAPGKGLEWVGEIRLKSNNYATHYAEPVKGRFTISRDDSKSTVYLQMNSLKTEDTAVYYCTRYYGNYGGYFDVWGAGTLVTVSSASTKGPSVFPLAPSSKSTSGGTAALGCLVKDYFPEPVTVSWNSGALTSGVHTFPAVLQSSGLYSLSSVVTVPSSSLGTQTYICNVNHKPSNTKVDKKVEPKSCDKTHTCPPCPAPPVAGPSVFLFPPKPKDTLMISRTPEVTCVVVDVKHEDPEVKFNWYVDGVEVHNAKTKPREEQYNSTYRVVSVLTVLHQDWLNGKEYKCKVSNKALPAPIEKTISKAKGQPREPQVYTLPPSREEMTKNQVSLTCLVKGFYPSDIAVEWESNGQPENNYKTTPPVLDSDGSFFLYSKLTVDKSRWQQGNVFSCSVMHEALHNHYTQKSLSLSPGK

SEQ ID NO: 20362 - protein, 122 aa, Artificial Sequence; identical to SEQ ID NO: 14717
  Description of Artificial Sequence: Synthetic polypeptide
  VH of XENP018984

SEQ ID NO: 20363 - protein, 5 aa, Artificial Sequence
  Description of Artificial Sequence: Synthetic peptide
  XENP018984 vhCDR1
NYWMN

SEQ ID NO: 20364 - protein, 19 aa, Artificial Sequence
  Description of Artificial Sequence: Synthetic peptide
  XENP018984 vhCDR2
EIRLKSNNYATHYAEPVKG

SEQ ID NO: 20365 - protein, 11 aa, Artificial Sequence
  Description of Artificial Sequence: Synthetic peptide
  XENP018984 vhCDR3
YYGNYGGYFDV

SEQ ID NO: 20366 - protein, 214 aa, Artificial Sequence; identical to SEQ ID NO: 16226
  Description of Artificial Sequence: Synthetic polypeptide
  XENP018984 1G6_H1.243_L1_IgG1_PVA_/S267K Light Chain

SEQ ID NO: 20367 - protein, 107 aa, Artificial Sequence; identical to SEQ ID NO: 10923
  Description of Artificial Sequence: Synthetic polypeptide
  VL of XENP018984

SEQ ID NO: 20368 - protein, 11 aa, Artificial Sequence
  Description of Artificial Sequence: Synthetic peptide
  XENP018984 vlCDR1
RASQSVSNDVA

SEQ ID NO: 20369 - protein, 7 aa, Artificial Sequence
  Description of Artificial Sequence: Synthetic peptide
  XENP018984 vlCDR2
YASHRYT

SEQ ID NO: 20370 - protein, 9 aa, Artificial Sequence
  Description of Artificial Sequence: Synthetic peptide
  XENP018984 vlCDR3
QQDYSSPRT

SEQ ID NO: 20371 - protein, 451 aa, Artificial Sequence
  Description of Artificial Sequence: Synthetic polypeptide
  XENP018985 1G6_H1.244_L1_IgG1_PVA_/S267K Heavy Chain
EVQLVESGGGLVKPGGSLRLSCAASGFTFSNYWMNWVRQAPGKGLQWVGEIRLKSNNYATHYAEPVKGRFTISRDDSKSTVYLQMNSLKTEDTAVYYCTRYYGNYGGYFDVWGAGTLVTVSSASTKGPSVFPLAPSSKSTSGGTAALGCLVKDYFPEPVTVSWNSGALTSGVHTFPAVLQSSGLYSLSSVVTVPSSSLGTQTYICNVNHKPSNTKVDKKVEPKSCDKTHTCPPCPAPPVAGPSVFLFPPKPKDTLMISRTPEVTCVVVDVKHEDPEVKFNWYVDGVEVHNAKTKPREEQYNSTYRVVSVLTVLHQDWLNGKEYKCKVSNKALPAPIEKTISKAKGQPREPQVYTLPPSREEMTKNQVSLTCLVKGFYPSDIAVEWESNGQPENNYKTTPPVLDSDGSFFLYSKLTVDKSRWQQGNVFSCSVMHEALHNHYTQKSLSLSPGK

SEQ ID NO: 20372 - protein, 122 aa, Artificial Sequence; identical to SEQ ID NO: 14726
  Description of Artificial Sequence: Synthetic polypeptide
  VH of XENP018985

SEQ ID NO: 20373 - protein, 5 aa, Artificial Sequence
  Description of Artificial Sequence: Synthetic peptide
  XENP018985 vhCDR1
NYWMN

SEQ ID NO: 20374 - protein, 19 aa, Artificial Sequence
  Description of Artificial Sequence: Synthetic peptide
  XENP018985 vhCDR2
EIRLKSNNYATHYAEPVKG

SEQ ID NO: 20375 - protein, 11 aa, Artificial Sequence
  Description of Artificial Sequence: Synthetic peptide
  XENP018985 vhCDR3
YYGNYGGYFDV

SEQ ID NO: 20376 - protein, 214 aa, Artificial Sequence; identical to SEQ ID NO: 16226
  Description of Artificial Sequence: Synthetic polypeptide
  XENP018985 1G6_H1.244_L1_IgG1_PVA_/S267K Light Chain

SEQ ID NO: 20377 - protein, 107 aa, Artificial Sequence; identical to SEQ ID NO: 10923
  Description of Artificial Sequence: Synthetic polypeptide
  VL of XENP018985

SEQ ID NO: 20378 - protein, 11 aa, Artificial Sequence
  Description of Artificial Sequence: Synthetic peptide
  XENP018985 vlCDR1
RASQSVSNDVA

SEQ ID NO: 20379 - protein, 7 aa, Artificial Sequence
  Description of Artificial Sequence: Synthetic peptide
  XENP018985 vlCDR2
YASHRYT

SEQ ID NO: 20380 - protein, 9 aa, Artificial Sequence
  Description of Artificial Sequence: Synthetic peptide
  XENP018985 vlCDR3
QQDYSSPRT

SEQ ID NO: 20381 - protein, 451 aa, Artificial Sequence
  Description of Artificial Sequence: Synthetic polypeptide
  XENP018986 1G6_H1.245_L1_IgG1_PVA_/S267K Heavy Chain
EVQLVESGGGLVKPGGSLRLSCAASGFTFSNYWMNWVRQAPGKGLEWIGEIRLKSNNYATHYAEPVKGRFTISRDDSKSTVYLQMNSLKTEDTAVYYCTRYYGNYGGYFDVWGAGTLVTVSSASTKGPSVFPLAPSSKSTSGGTAALGCLVKDYFPEPVTVSWNSGALTSGVHTFPAVLQSSGLYSLSSVVTVPSSSLGTQTYICNVNHKPSNTKVDKKVEPKSCDKTHTCPPCPAPPVAGPSVFLFPPKPKDTLMISRTPEVTCVVVDVKHEDPEVKFNWYVDGVEVHNAKTKPREEQYNSTYRVVSVLTVLHQDWLNGKEYKCKVSNKALPAPIEKTISKAKGQPREPQVYTLPPSREEMTKNQVSLTCLVKGFYPSDIAVEWESNGQPENNYKTTPPVLDSDGSFFLYSKLTVDKSRWQQGNVFSCSVMHEALHNHYTQKSLSLSPGK

SEQ ID NO: 20382 - protein, 122 aa, Artificial Sequence; identical to SEQ ID NO: 14735
  Description of Artificial Sequence: Synthetic polypeptide
  VH of XENP018986

SEQ ID NO: 20383 - protein, 5 aa, Artificial Sequence
  Description of Artificial Sequence: Synthetic peptide
  XENP018986 vhCDR1
NYWMN

SEQ ID NO: 20384 - protein, 19 aa, Artificial Sequence
  Description of Artificial Sequence: Synthetic peptide
  XENP018986 vhCDR2
EIRLKSNNYATHYAEPVKG

SEQ ID NO: 20385 - protein, 11 aa, Artificial Sequence
  Description of Artificial Sequence: Synthetic peptide
  XENP018986 vhCDR3
YYGNYGGYFDV

SEQ ID NO: 20386 - protein, 214 aa, Artificial Sequence; identical to SEQ ID NO: 16226
  Description of Artificial Sequence: Synthetic polypeptide
  XENP018986 1G6_H1.245_L1_IgG1_PVA_/S267K Light Chain

SEQ ID NO: 20387 - protein, 107 aa, Artificial Sequence; identical to SEQ ID NO: 10923
  Description of Artificial Sequence: Synthetic polypeptide
  VL of XENP018986

SEQ ID NO: 20388 - protein, 11 aa, Artificial Sequence
  Description of Artificial Sequence: Synthetic peptide
  XENP018986 vlCDR1
RASQSVSNDVA

SEQ ID NO: 20389 - protein, 7 aa, Artificial Sequence
  Description of Artificial Sequence: Synthetic peptide
  XENP018986 vlCDR2
YASHRYT

SEQ ID NO: 20390 - protein, 9 aa, Artificial Sequence
  Description of Artificial Sequence: Synthetic peptide
  XENP018986 vlCDR3
QQDYSSPRT

SEQ ID NO: 20391 - protein, 451 aa, Artificial Sequence
  Description of Artificial Sequence: Synthetic polypeptide
  XENP018987 1G6_H1.246_L1_IgG1_PVA_/S267K Heavy Chain
EVQLVESGGGLVKPGGSLRLSCAASGFTFSNYWMNWVRQAPGKGLEWMGEIRLKSNNYATHYAEPVKGRFTISRDDSKSTVYLQMNSLKTEDTAVYYCTRYYGNYGGYFDVWGAGTLVTVSSASTKGPSVFPLAPSSKSTSGGTAALGCLVKDYFPEPVTVSWNSGALTSGVHTFPAVLQSSGLYSLSSVVTVPSSSLGTQTYICNVNHKPSNTKVDKKVEPKSCDKTHTCPPCPAPPVAGPSVFLFPPKPKDTLMISRTPEVTCVVVDVKHEDPEVKFNWYVDGVEVHNAKTKPREEQYNSTYRVVSVLTVLHQDWLNGKEYKCKVSNKALPAPIEKTISKAKGQPREPQVYTLPPSREEMTKNQVSLTCLVKGFYPSDIAVEWESNGQPENNYKTTPPVLDSDGSFFLYSKLTVDKSRWQQGNVFSCSVMHEALHNHYTQKSLSLSPGK

SEQ ID NO: 20392 - protein, 122 aa, Artificial Sequence; identical to SEQ ID NO: 14744
  Description of Artificial Sequence: Synthetic polypeptide
  VH of XENP018987

SEQ ID NO: 20393 - protein, 5 aa, Artificial Sequence
  Description of Artificial Sequence: Synthetic peptide
  XENP018987 vhCDR1
NYWMN

SEQ ID NO: 20394 - protein, 19 aa, Artificial Sequence
  Description of Artificial Sequence: Synthetic peptide
  XENP018987 vhCDR2
EIRLKSNNYATHYAEPVKG

SEQ ID NO: 20395 - protein, 11 aa, Artificial Sequence
  Description of Artificial Sequence: Synthetic peptide
  XENP018987 vhCDR3
YYGNYGGYFDV

SEQ ID NO: 20396 - protein, 214 aa, Artificial Sequence; identical to SEQ ID NO: 16226
  Description of Artificial Sequence: Synthetic polypeptide
  XENP018987 1G6_H1.246_L1_IgG1_PVA_/S267K Light Chain

SEQ ID NO: 20397 - protein, 107 aa, Artificial Sequence; identical to SEQ ID NO: 10923
  Description of Artificial Sequence: Synthetic polypeptide
  VL of XENP018987

SEQ ID NO: 20398 - protein, 11 aa, Artificial Sequence
  Description of Artificial Sequence: Synthetic peptide
  XENP018987 vlCDR1
RASQSVSNDVA

SEQ ID NO: 20399 - protein, 7 aa, Artificial Sequence
  Description of Artificial Sequence: Synthetic peptide
  XENP018987 vlCDR2
YASHRYT

SEQ ID NO: 20400 - protein, 9 aa, Artificial Sequence
  Description of Artificial Sequence: Synthetic peptide
  XENP018987 vlCDR3
QQDYSSPRT

SEQ ID NO: 20401 - protein, 451 aa, Artificial Sequence
  Description of Artificial Sequence: Synthetic polypeptide
  XENP018988 1G6_H1.247_L1_IgG1_PVA_/S267K Heavy Chain
EVQLVESGGGLVKPGGSLRLSCAASGFTFSNYWMNWVRQAPGKGLEWVGEIRLKSNNYATHYAEPFKGRFTISRDDSKSTVYLQMNSLKTEDTAVYYCTRYYGNYGGYFDVWGAGTLVTVSSASTKGPSVFPLAPSSKSTSGGTAALGCLVKDYFPEPVTVSWNSGALTSGVHTFPAVLQSSGLYSLSSVVTVPSSSLGTQTYICNVNHKPSNTKVDKKVEPKSCDKTHTCPPCPAPPVAGPSVFLFPPKPKDTLMISRTPEVTCVVVDVKHEDPEVKFNWYVDGVEVHNAKTKPREEQYNSTYRVVSVLTVLHQDWLNGKEYKCKVSNKALPAPIEKTISKAKGQPREPQVYTLPPSREEMTKNQVSLTCLVKGFYPSDIAVEWESNGQPENNYKTTPPVLDSDGSFFLYSKLTVDKSRWQQGNVFSCSVMHEALHNHYTQKSLSLSPGK

SEQ ID NO: 20402 - protein, 122 aa, Artificial Sequence; identical to SEQ ID NO: 14753
  Description of Artificial Sequence: Synthetic polypeptide
  VH of XENP018988

SEQ ID NO: 20403 - protein, 5 aa, Artificial Sequence
  Description of Artificial Sequence: Synthetic peptide
  XENP018988 vhCDR1
NYWMN

SEQ ID NO: 20404 - protein, 19 aa, Artificial Sequence
  Description of Artificial Sequence: Synthetic peptide
  XENP018988 vhCDR2
EIRLKSNNYATHYAEPFKG

SEQ ID NO: 20405 - protein, 11 aa, Artificial Sequence
  Description of Artificial Sequence: Synthetic peptide
  XENP018988 vhCDR3
YYGNYGGYFDV

SEQ ID NO: 20406 - protein, 214 aa, Artificial Sequence; identical to SEQ ID NO: 16226
  Description of Artificial Sequence: Synthetic polypeptide
  XENP018988 1G6_H1.247_L1_IgG1_PVA_/S267K Light Chain

SEQ ID NO: 20407 - protein, 107 aa, Artificial Sequence; identical to SEQ ID NO: 10923
  Description of Artificial Sequence: Synthetic polypeptide
  VL of XENP018988

SEQ ID NO: 20408 - protein, 11 aa, Artificial Sequence
  Description of Artificial Sequence: Synthetic peptide
  XENP018988 vlCDR1
RASQSVSNDVA

SEQ ID NO: 20409 - protein, 7 aa, Artificial Sequence
  Description of Artificial Sequence: Synthetic peptide
  XENP018988 vlCDR2
YASHRYT

SEQ ID NO: 20410 - protein, 9 aa, Artificial Sequence
  Description of Artificial Sequence: Synthetic peptide
  XENP018988 vlCDR3
QQDYSSPRT

SEQ ID NO: 20411 - protein, 451 aa, Artificial Sequence
  Description of Artificial Sequence: Synthetic polypeptide
  XENP018989 1G6_H1.248_L1_IgG1_PVA_/S267K Heavy Chain
EVQLVESGGGLVKPGGSLRLSCAASGFTFSNYWMNWVRQAPGKGLEWVGEIRLKSNNYATHYAEPVKGRATISRDDSKSTVYLQMNSLKTEDTAVYYCTRYYGNYGGYFDVWGAGTLVTVSSASTKGPSVFPLAPSSKSTSGGTAALGCLVKDYFPEPVTVSWNSGALTSGVHTFPAVLQSSGLYSLSSVVTVPSSSLGTQTYICNVNHKPSNTKVDKKVEPKSCDKTHTCPPCPAPPVAGPSVFLFPPKPKDTLMISRTPEVTCVVVDVKHEDPEVKFNWYVDGVEVHNAKTKPREEQYNSTYRVVSVLTVLHQDWLNGKEYKCKVSNKALPAPIEKTISKAKGQPREPQVYTLPPSREEMTKNQVSLTCLVKGFYPSDIAVEWESNGQPENNYKTTPPVLDSDGSFFLYSKLTVDKSRWQQGNVFSCSVMHEALHNHYTQKSLSLSPGK

SEQ ID NO: 20412 - protein, 122 aa, Artificial Sequence; identical to SEQ ID NO: 14762
  Description of Artificial Sequence: Synthetic polypeptide
  VH of XENP018989

SEQ ID NO: 20413 - protein, 5 aa, Artificial Sequence
  Description of Artificial Sequence: Synthetic peptide
  XENP018989 vhCDR1
NYWMN

SEQ ID NO: 20414 - protein, 19 aa, Artificial Sequence
  Description of Artificial Sequence: Synthetic peptide
  XENP018989 vhCDR2
EIRLKSNNYATHYAEPVKG

SEQ ID NO: 20415 - protein, 11 aa, Artificial Sequence
  Description of Artificial Sequence: Synthetic peptide
  XENP018989 vhCDR3
YYGNYGGYFDV

SEQ ID NO: 20416 - protein, 214 aa, Artificial Sequence; identical to SEQ ID NO: 16226
  Description of Artificial Sequence: Synthetic polypeptide
  XENP018989 1G6_H1.248_L1_IgG1_PVA_/S267K Light Chain

SEQ ID NO: 20417 - protein, 107 aa, Artificial Sequence; identical to SEQ ID NO: 10923
  Description of Artificial Sequence: Synthetic polypeptide
  VL of XENP018989

SEQ ID NO: 20418 - protein, 11 aa, Artificial Sequence
  Description of Artificial Sequence: Synthetic peptide
  XENP018989 vlCDR1
RASQSVSNDVA

SEQ ID NO: 20419 - protein, 7 aa, Artificial Sequence
  Description of Artificial Sequence: Synthetic peptide
  XENP018989 vlCDR2
YASHRYT

SEQ ID NO: 20420 - protein, 9 aa, Artificial Sequence
  Description of Artificial Sequence: Synthetic peptide
  XENP018989 vlCDR3
QQDYSSPRT

SEQ ID NO: 20421 - protein, 451 aa, Artificial Sequence
  Description of Artificial Sequence: Synthetic polypeptide
  XENP018990 1G6_H1.249_L1_IgG1_PVA_/S267K Heavy Chain
EVQLVESGGGLVKPGGSLRLSCAASGFTFSNYWMNWVRQAPGKGLEWVGEIRLKSNNYATHYAEPVKGRVTISRDDSKSTVYLQMNSLKTEDTAVYYCTRYYGNYGGYFDVWGAGTLVTVSSASTKGPSVFPLAPSSKSTSGGTAALGCLVKDYFPEPVTVSWNSGALTSGVHTFPAVLQSSGLYSLSSVVTVPSSSLGTQTYICNVNHKPSNTKVDKKVEPKSCDKTHTCPPCPAPPVAGPSVFLFPPKPKDTLMISRTPEVTCVVVDVKHEDPEVKFNWYVDGVEVHNAKTKPREEQYNSTYRVVSVLTVLHQDWLNGKEYKCKVSNKALPAPIEKTISKAKGQPREPQVYTLPPSREEMTKNQVSLTCLVKGFYPSDIAVEWESNGQPENNYKTTPPVLDSDGSFFLYSKLTVDKSRWQQGNVFSCSVMHEALHNHYTQKSLSLSPGK

SEQ ID NO: 20422 - protein, 122 aa, Artificial Sequence; identical to SEQ ID NO: 14771
  Description of Artificial Sequence: Synthetic polypeptide
  VH of XENP018990

SEQ ID NO: 20423 - protein, 5 aa, Artificial Sequence
  Description of Artificial Sequence: Synthetic peptide
  XENP018990 vhCDR1
NYWMN

SEQ ID NO: 20424 - protein, 19 aa, Artificial Sequence
  Description of Artificial Sequence: Synthetic peptide
  XENP018990 vhCDR2
EIRLKSNNYATHYAEPVKG

SEQ ID NO: 20425 - protein, 11 aa, Artificial Sequence
  Description of Artificial Sequence: Synthetic peptide
  XENP018990 vhCDR3
YYGNYGGYFDV

SEQ ID NO: 20426 - protein, 214 aa, Artificial Sequence; identical to SEQ ID NO: 16226
  Description of Artificial Sequence: Synthetic polypeptide
  XENP018990 1G6_H1.249_L1_IgG1_PVA_/S267K Light Chain

SEQ ID NO: 20427 - protein, 107 aa, Artificial Sequence; identical to SEQ ID NO: 10923
  Description of Artificial Sequence: Synthetic polypeptide
  VL of XENP018990

SEQ ID NO: 20428 - protein, 11 aa, Artificial Sequence
  Description of Artificial Sequence: Synthetic peptide
  XENP018990 vlCDR1
RASQSVSNDVA

SEQ ID NO: 20429 - protein, 7 aa, Artificial Sequence
  Description of Artificial Sequence: Synthetic peptide
  XENP018990 vlCDR2
YASHRYT

SEQ ID NO: 20430 - protein, 9 aa, Artificial Sequence
  Description of Artificial Sequence: Synthetic peptide
  XENP018990 vlCDR3
QQDYSSPRT

SEQ ID NO: 20431 - protein, 451 aa, Artificial Sequence
  Description of Artificial Sequence: Synthetic polypeptide
  XENP018991 1G6_H1.250_L1_IgG1_PVA_/S267K Heavy Chain
EVQLVESGGGLVKPGGSLRLSCAASGFTFSNYWMNWVRQAPGKGLEWVGEIRLKSNNYATHYAEPVKGRFTISRDDSSSTVYLQMNSLKTEDTAVYYCTRYYGNYGGYFDVWGAGTLVTVSSASTKGPSVFPLAPSSKSTSGGTAALGCLVKDYFPEPVTVSWNSGALTSGVHTFPAVLQSSGLYSLSSVVTVPSSSLGTQTYICNVNHKPSNTKVDKKVEPKSCDKTHTCPPCPAPPVAGPSVFLFPPKPKDTLMISRTPEVTCVVVDVKHEDPEVKFNWYVDGVEVHNAKTKPREEQYNSTYRVVSVLTVLHQDWLNGKEYKCKVSNKALPAPIEKTISKAKGQPREPQVYTLPPSREEMTKNQVSLTCLVKGFYPSDIAVEWESNGQPENNYKTTPPVLDSDGSFFLYSKLTVDKSRWQQGNVFSCSVMHEALHNHYTQKSLSLSPGK

SEQ ID NO: 20432 - protein, 122 aa, Artificial Sequence; identical to SEQ ID NO: 14780
  Description of Artificial Sequence: Synthetic polypeptide
  VH of XENP018991

SEQ ID NO: 20433 - protein, 5 aa, Artificial Sequence
  Description of Artificial Sequence: Synthetic peptide
  XENP018991 vhCDR1
NYWMN

SEQ ID NO: 20434 - protein, 19 aa, Artificial Sequence
  Description of Artificial Sequence: Synthetic peptide
  XENP018991 vhCDR2
EIRLKSNNYATHYAEPVKG

SEQ ID NO: 20435 - protein, 11 aa, Artificial Sequence
  Description of Artificial Sequence: Synthetic peptide
  XENP018991 vhCDR3
YYGNYGGYFDV

SEQ ID NO: 20436 - protein, 214 aa, Artificial Sequence; identical to SEQ ID NO: 16226
  Description of Artificial Sequence: Synthetic polypeptide
  XENP018991 1G6_H1.250_L1_IgG1_PVA_/S267K Light Chain

SEQ ID NO: 20437 - protein, 107 aa, Artificial Sequence; identical to SEQ ID NO: 10923
  Description of Artificial Sequence: Synthetic polypeptide
  VL of XENP018991

SEQ ID NO: 20438 - protein, 11 aa, Artificial Sequence
  Description of Artificial Sequence: Synthetic peptide
  XENP018991 vlCDR1
RASQSVSNDVA

SEQ ID NO: 20439 - protein, 7 aa, Artificial Sequence
  Description of Artificial Sequence: Synthetic peptide
  XENP018991 vlCDR2
YASHRYT

SEQ ID NO: 20440 - protein, 9 aa, Artificial Sequence
  Description of Artificial Sequence: Synthetic peptide
  XENP018991 vlCDR3
QQDYSSPRT

SEQ ID NO: 20441 - protein, 451 aa, Artificial Sequence
  Description of Artificial Sequence: Synthetic polypeptide
  XENP018992 1G6_H1.251_L1_IgG1_PVA_/S267K Heavy Chain
EVQLVESGGGLVKPGGSLRLSCAASGFTFSNYWMNWVRQAPGKGLEWVGEIRLKSNNYATHYAEPVKGRFTISRDDSKSMVYLQMNSLKTEDTAVYYCTRYYGNYGGYFDVWGAGTLVTVSSASTKGPSVFPLAPSSKSTSGGTAALGCLVKDYFPEPVTVSWNSGALTSGVHTFPAVLQSSGLYSLSSVVTVPSSSLGTQTYICNVNHKPSNTKVDKKVEPKSCDKTHTCPPCPAPPVAGPSVFLFPPKPKDTLMISRTPEVTCVVVDVKHEDPEVKFNWYVDGVEVHNAKTKPREEQYNSTYRVVSVLTVLHQDWLNGKEYKCKVSNKALPAPIEKTISKAKGQPREPQVYTLPPSREEMTKNQVSLTCLVKGFYPSDIAVEWESNGQPENNYKTTPPVLDSDGSFFLYSKLTVDKSRWQQGNVFSCSVMHEALHNHYTQKSLSLSPGK

SEQ ID NO: 20442 - protein, 122 aa, Artificial Sequence; identical to SEQ ID NO: 14789
  Description of Artificial Sequence: Synthetic polypeptide
  VH of XENP018992

SEQ ID NO: 20443 - protein, 5 aa, Artificial Sequence
  Description of Artificial Sequence: Synthetic peptide
  XENP018992 vhCDR1
NYWMN

SEQ ID NO: 20444 - protein, 19 aa, Artificial Sequence
  Description of Artificial Sequence: Synthetic peptide
  XENP018992 vhCDR2
EIRLKSNNYATHYAEPVKG

SEQ ID NO: 20445 - protein, 11 aa, Artificial Sequence
  Description of Artificial Sequence: Synthetic peptide
  XENP018992 vhCDR3
YYGNYGGYFDV

SEQ ID NO: 20446 - protein, 214 aa, Artificial Sequence; identical to SEQ ID NO: 16226
  Description of Artificial Sequence: Synthetic polypeptide
  XENP018992 1G6_H1.251_L1_IgG1_PVA_/S267K Light Chain

SEQ ID NO: 20447 - protein, 107 aa, Artificial Sequence; identical to SEQ ID NO: 10923
  Description of Artificial Sequence: Synthetic polypeptide
  VL of XENP018992

SEQ ID NO: 20448 - protein, 11 aa, Artificial Sequence
  Description of Artificial Sequence: Synthetic peptide
  XENP018992 vlCDR1
RASQSVSNDVA

SEQ ID NO: 20449 - protein, 7 aa, Artificial Sequence
  Description of Artificial Sequence: Synthetic peptide
  XENP018992 vlCDR2
YASHRYT

SEQ ID NO: 20450 - protein, 9 aa, Artificial Sequence
  Description of Artificial Sequence: Synthetic peptide
  XENP018992 vlCDR3
QQDYSSPRT

SEQ ID NO: 20451 - protein, 451 aa, Artificial Sequence
  Description of Artificial Sequence: Synthetic polypeptide
  XENP018993 1G6_H1.252_L1_IgG1_PVA_/S267K Heavy Chain
EVQLVESGGGLVKPGGSLRLSCAASGFTFSNYWMNWVRQAPGKGLEWVGEIRLKSNNYATHYAEPVKGRFTISRDDSKSQVYLQMNSLKTEDTAVYYCTRYYGNYGGYFDVWGAGTLVTVSSASTKGPSVFPLAPSSKSTSGGTAALGCLVKDYFPEPVTVSWNSGALTSGVHTFPAVLQSSGLYSLSSVVTVPSSSLGTQTYICNVNHKPSNTKVDKKVEPKSCDKTHTCPPCPAPPVAGPSVFLFPPKPKDTLMISRTPEVTCVVVDVKHEDPEVKFNWYVDGVEVHNAKTKPREEQYNSTYRVVSVLTVLHQDWLNGKEYKCKVSNKALPAPIEKTISKAKGQPREPQVYTLPPSREEMTKNQVSLTCLVKGFYPSDIAVEWESNGQPENNYKTTPPVLDSDGSFFLYSKLTVDKSRWQQGNVFSCSVMHEALHNHYTQKSLSLSPGK

SEQ ID NO: 20452 - protein, 122 aa, Artificial Sequence; identical to SEQ ID NO: 14798
  Description of Artificial Sequence: Synthetic polypeptide
  VH of XENP018993

SEQ ID NO: 20453 - protein, 5 aa, Artificial Sequence
  Description of Artificial Sequence: Synthetic peptide
  XENP018993 vhCDR1
NYWMN

SEQ ID NO: 20454 - protein, 19 aa, Artificial Sequence
  Description of Artificial Sequence: Synthetic peptide
  XENP018993 vhCDR2
EIRLKSNNYATHYAEPVKG

SEQ ID NO: 20455 - protein, 11 aa, Artificial Sequence
  Description of Artificial Sequence: Synthetic peptide
  XENP018993 vhCDR3
YYGNYGGYFDV

SEQ ID NO: 20456 - protein, 214 aa, Artificial Sequence; identical to SEQ ID NO: 16226
  Description of Artificial Sequence: Synthetic polypeptide
  XENP018993 1G6_H1.252_L1_IgG1_PVA_/S267K Light Chain

SEQ ID NO: 20457 - protein, 107 aa, Artificial Sequence; identical to SEQ ID NO: 10923
  Description of Artificial Sequence: Synthetic polypeptide
  VL of XENP018993

SEQ ID NO: 20458 - protein, 11 aa, Artificial Sequence
  Description of Artificial Sequence: Synthetic peptide
  XENP018993 vlCDR1
RASQSVSNDVA

SEQ ID NO: 20459 - protein, 7 aa, Artificial Sequence
  Description of Artificial Sequence: Synthetic peptide
  XENP018993 vlCDR2
YASHRYT

SEQ ID NO: 20460 - protein, 9 aa, Artificial Sequence
  Description of Artificial Sequence: Synthetic peptide
  XENP018993 vlCDR3
QQDYSSPRT

SEQ ID NO: 20461 - protein, 451 aa, Artificial Sequence
  Description of Artificial Sequence: Synthetic polypeptide
  XENP018994 1G6_H1.253_L1_IgG1_PVA_/S267K Heavy Chain
EVQLVESGGGLVKPGGSLRLSCAASGFTFSNYWMNWVRQAPGKGLEWVGEIRLKSNNYATHYAEPVKGRFTISRDDSKSTVVLQMNSLKTEDTAVYYCTRYYGNYGGYFDVWGAGTLVTVSSASTKGPSVFPLAPSSKSTSGGTAALGCLVKDYFPEPVTVSWNSGALTSGVHTFPAVLQSSGLYSLSSVVTVPSSSLGTQTYICNVNHKPSNTKVDKKVEPKSCDKTHTCPPCPAPPVAGPSVFLFPPKPKDTLMISRTPEVTCVVVDVKHEDPEVKFNWYVDGVEVHNAKTKPREEQYNSTYRVVSVLTVLHQDWLNGKEYKCKVSNKALPAPIEKTISKAKGQPREPQVYTLPPSREEMTKNQVSLTCLVKGFYPSDIAVEWESNGQPENNYKTTPPVLDSDGSFFLYSKLTVDKSRWQQGNVFSCSVMHEALHNHYTQKSLSLSPGK

SEQ ID NO: 20462 - protein, 122 aa, Artificial Sequence; identical to SEQ ID NO: 14807
  Description of Artificial Sequence: Synthetic polypeptide
  VH of XENP018994

SEQ ID NO: 20463 - protein, 5 aa, Artificial Sequence
  Description of Artificial Sequence: Synthetic peptide
  XENP018994 vhCDR1
NYWMN

SEQ ID NO: 20464 - protein, 19 aa, Artificial Sequence
  Description of Artificial Sequence: Synthetic peptide
  XENP018994 vhCDR2
EIRLKSNNYATHYAEPVKG

SEQ ID NO: 20465 - protein, 11 aa, Artificial Sequence
  Description of Artificial Sequence: Synthetic peptide
  XENP018994 vhCDR3
YYGNYGGYFDV

SEQ ID NO: 20466 - protein, 214 aa, Artificial Sequence; identical to SEQ ID NO: 16226
  Description of Artificial Sequence: Synthetic polypeptide
  XENP018994 1G6_H1.253_L1_IgG1_PVA_/S267K Light Chain

SEQ ID NO: 20467 - protein, 107 aa, Artificial Sequence; identical to SEQ ID NO: 10923
  Description of Artificial Sequence: Synthetic polypeptide
  VL of XENP018994

SEQ ID NO: 20468 - protein, 11 aa, Artificial Sequence
  Description of Artificial Sequence: Synthetic peptide
  XENP018994 vlCDR1
RASQSVSNDVA

SEQ ID NO: 20469 - protein, 7 aa, Artificial Sequence
  Description of Artificial Sequence: Synthetic peptide
  XENP018994 vlCDR2
YASHRYT

SEQ ID NO: 20470 - protein, 9 aa, Artificial Sequence
  Description of Artificial Sequence: Synthetic peptide
  XENP018994 vlCDR3
QQDYSSPRT

SEQ ID NO: 20471 - protein, 451 aa, Artificial Sequence
  Description of Artificial Sequence: Synthetic polypeptide
  XENP018995 1G6_H1.254_L1_IgG1_PVA_/S267K Heavy Chain
EVQLVESGGGLVKPGGSLRLSCAASGFTFSNYWMNWVRQAPGKGLEWVGEIRLKSNNYATHYAEPVKGRFTISRDDSKSTVYLEMNSLKTEDTAVYYCTRYYGNYGGYFDVWGAGTLVTVSSASTKGPSVFPLAPSSKSTSGGTAALGCLVKDYFPEPVTVSWNSGALTSGVHTFPAVLQSSGLYSLSSVVTVPSSSLGTQTYICNVNHKPSNTKVDKKVEPKSCDKTHTCPPCPAPPVAGPSVFLFPPKPKDTLMISRTPEVTCVVVDVKHEDPEVKFNWYVDGVEVHNAKTKPREEQYNSTYRVVSVLTVLHQDWLNGKEYKCKVSNKALPAPIEKTISKAKGQPREPQVYTLPPSREEMTKNQVSLTCLVKGFYPSDIAVEWESNGQPENNYKTTPPVLDSDGSFFLYSKLTVDKSRWQQGNVFSCSVMHEALHNHYTQKSLSLSPGK

SEQ ID NO: 20472 - protein, 122 aa, Artificial Sequence; identical to SEQ ID NO: 14816
  Description of Artificial Sequence: Synthetic polypeptide
  VH of XENP018995

SEQ ID NO: 20473 - protein, 5 aa, Artificial Sequence
  Description of Artificial Sequence: Synthetic peptide
  XENP018995 vhCDR1
NYWMN

SEQ ID NO: 20474 - protein, 19 aa, Artificial Sequence
  Description of Artificial Sequence: Synthetic peptide
  XENP018995 vhCDR2
EIRLKSNNYATHYAEPVKG

SEQ ID NO: 20475 - protein, 11 aa, Artificial Sequence
  Description of Artificial Sequence: Synthetic peptide
  XENP018995 vhCDR3
YYGNYGGYFDV

SEQ ID NO: 20476 - protein, 214 aa, Artificial Sequence; identical to SEQ ID NO: 16226
  Description of Artificial Sequence: Synthetic polypeptide
  XENP018995 1G6_H1.254_L1_IgG1_PVA_/S267K Light Chain

SEQ ID NO: 20477 - protein, 107 aa, Artificial Sequence; identical to SEQ ID NO: 10923
  Description of Artificial Sequence: Synthetic polypeptide
  VL of XENP018995

SEQ ID NO: 20478 - protein, 11 aa, Artificial Sequence
  Description of Artificial Sequence: Synthetic peptide
  XENP018995 vlCDR1
RASQSVSNDVA

SEQ ID NO: 20479 - protein, 7 aa, Artificial Sequence
  Description of Artificial Sequence: Synthetic peptide
  XENP018995 vlCDR2
YASHRYT

SEQ ID NO: 20480 - protein, 9 aa, Artificial Sequence
  Description of Artificial Sequence: Synthetic peptide
  XENP018995 vlCDR3
QQDYSSPRT

SEQ ID NO: 20481 - protein, 451 aa, Artificial Sequence
  Description of Artificial Sequence: Synthetic polypeptide
  XENP018996 1G6_H1.255_L1_IgG1_PVA_/S267K Heavy Chain
EVQLVESGGGLVKPGGSLRLSCAASGFTFSNYWMNWVRQAPGKGLEWVGEIRLKSNNYATHYAEPVKGRFTISRDDSKSTVYLQMNSEKTEDTAVYYCTRYYGNYGGYFDVWGAGTLVTVSSASTKGPSVFPLAPSSKSTSGGTAALGCLVKDYFPEPVTVSWNSGALTSGVHTFPAVLQSSGLYSLSSVVTVPSSSLGTQTYICNVNHKPSNTKVDKKVEPKSCDKTHTCPPCPAPPVAGPSVFLFPPKPKDTLMISRTPEVTCVVVDVKHEDPEVKFNWYVDGVEVHNAKTKPREEQYNSTYRVVSVLTVLHQDWLNGKEYKCKVSNKALPAPIEKTISKAKGQPREPQVYTLPPSREEMTKNQVSLTCLVKGFYPSDIAVEWESNGQPENNYKTTPPVLDSDGSFFLYSKLTVDKSRWQQGNVFSCSVMHEALHNHYTQKSLSLSPGK

SEQ ID NO: 20482 - protein, 122 aa, Artificial Sequence; identical to SEQ ID NO: 14825
  Description of Artificial Sequence: Synthetic polypeptide
  VH of XENP018996

SEQ ID NO: 20483 - protein, 5 aa, Artificial Sequence
  Description of Artificial Sequence: Synthetic peptide
  XENP018996 vhCDR1
NYWMN

SEQ ID NO: 20484 - protein, 19 aa, Artificial Sequence
  Description of Artificial Sequence: Synthetic peptide
  XENP018996 vhCDR2
EIRLKSNNYATHYAEPVKG

SEQ ID NO: 20485 - protein, 11 aa, Artificial Sequence
  Description of Artificial Sequence: Synthetic peptide
  XENP018996 vhCDR3
YYGNYGGYFDV

SEQ ID NO: 20486 - protein, 214 aa, Artificial Sequence; identical to SEQ ID NO: 16226
  Description of Artificial Sequence: Synthetic polypeptide
  XENP018996 1G6_H1.255_L1_IgG1_PVA_/S267K Light Chain

SEQ ID NO: 20487 - protein, 107 aa, Artificial Sequence; identical to SEQ ID NO: 10923
  Description of Artificial Sequence: Synthetic polypeptide
  VL of XENP018996

SEQ ID NO: 20488 - protein, 11 aa, Artificial Sequence
  Description of Artificial Sequence: Synthetic peptide
  XENP018996 vlCDR1
RASQSVSNDVA

SEQ ID NO: 20489 - protein, 7 aa, Artificial Sequence
  Description of Artificial Sequence: Synthetic peptide
  XENP018996 vlCDR2
YASHRYT

SEQ ID NO: 20490 - protein, 9 aa, Artificial Sequence
  Description of Artificial Sequence: Synthetic peptide
  XENP018996 vlCDR3
QQDYSSPRT

SEQ ID NO: 20491 - protein, 451 aa, Artificial Sequence
  Description of Artificial Sequence: Synthetic polypeptide
  XENP019001 1G6_H1.256_L1_IgG1_PVA_/S267K Heavy Chain
EVQLVESGGGLVKPGGSLRLSCAASGFTFSNYWMNWVRQAPGKGLEWVGEIRLKSNNYATHYAEPVKGRFTISRDDSKSTVYLQMNSVKTEDTAVYYCTRYYGNYGGYFDVWGAGTLVTVSSASTKGPSVFPLAPSSKSTSGGTAALGCLVKDYFPEPVTVSWNSGALTSGVHTFPAVLQSSGLYSLSSVVTVPSSSLGTQTYICNVNHKPSNTKVDKKVEPKSCDKTHTCPPCPAPPVAGPSVFLFPPKPKDTLMISRTPEVTCVVVDVKHEDPEVKFNWYVDGVEVHNAKTKPREEQYNSTYRVVSVLTVLHQDWLNGKEYKCKVSNKALPAPIEKTISKAKGQPREPQVYTLPPSREEMTKNQVSLTCLVKGFYPSDIAVEWESNGQPENNYKTTPPVLDSDGSFFLYSKLTVDKSRWQQGNVFSCSVMHEALHNHYTQKSLSLSPGK

SEQ ID NO: 20492 - protein, 122 aa, Artificial Sequence; identical to SEQ ID NO: 14834
  Description of Artificial Sequence: Synthetic polypeptide
  VH of XENP019001

SEQ ID NO: 20493 - protein, 5 aa, Artificial Sequence
  Description of Artificial Sequence: Synthetic peptide
  XENP019001 vhCDR1
NYWMN

SEQ ID NO: 20494 - protein, 19 aa, Artificial Sequence
  Description of Artificial Sequence: Synthetic peptide
  XENP019001 vhCDR2
EIRLKSNNYATHYAEPVKG

SEQ ID NO: 20495 - protein, 11 aa, Artificial Sequence
  Description of Artificial Sequence: Synthetic peptide
  XENP019001 vhCDR3
YYGNYGGYFDV

SEQ ID NO: 20496 - protein, 214 aa, Artificial Sequence; identical to SEQ ID NO: 16226
  Description of Artificial Sequence: Synthetic polypeptide
  XENP019001 1G6_H1.256_L1_IgG1_PVA_/S267K Light Chain

SEQ ID NO: 20497 - protein, 107 aa, Artificial Sequence; identical to SEQ ID NO: 10923
  Description of Artificial Sequence: Synthetic polypeptide
  VL of XENP019001

SEQ ID NO: 20498 - protein, 11 aa, Artificial Sequence
  Description of Artificial Sequence: Synthetic peptide
  XENP019001 vlCDR1
RASQSVSNDVA

SEQ ID NO: 20499 - protein, 7 aa, Artificial Sequence
  Description of Artificial Sequence: Synthetic peptide
  XENP019001 vlCDR2
YASHRYT

SEQ ID NO: 20500 - protein, 9 aa, Artificial Sequence
  Description of Artificial Sequence: Synthetic peptide
  XENP019001 vlCDR3
QQDYSSPRT

SEQ ID NO: 20501 - protein, 451 aa, Artificial Sequence
  Description of Artificial Sequence: Synthetic polypeptide
  XENP019002 1G6_H1.257_L1_IgG1_PVA_/S267K Heavy Chain
EVQLVESGGGLVKPGGSLRLSCAASGFTFSNYWMNWVRQAPGKGLEWVGEIRLKSNNYATHYAEPVKGRFTISRDDSKSTVYLQMNSLKTEDTAVYYCTRYYGNYGGYFDVWGRGTLVTVSSASTKGPSVFPLAPSSKSTSGGTAALGCLVKDYFPEPVTVSWNSGALTSGVHTFPAVLQSSGLYSLSSVVTVPSSSLGTQTYICNVNHKPSNTKVDKKVEPKSCDKTHTCPPCPAPPVAGPSVFLFPPKPKDTLMISRTPEVTCVVVDVKHEDPEVKFNWYVDGVEVHNAKTKPREEQYNSTYRVVSVLTVLHQDWLNGKEYKCKVSNKALPAPIEKTISKAKGQPREPQVYTLPPSREEMTKNQVSLTCLVKGFYPSDIAVEWESNGQPENNYKTTPPVLDSDGSFFLYSKLTVDKSRWQQGNVFSCSVMHEALHNHYTQKSLSLSPGK

SEQ ID NO: 20502 - protein, 122 aa, Artificial Sequence; identical to SEQ ID NO: 14843
  Description of Artificial Sequence: Synthetic polypeptide
  VH of XENP019002

SEQ ID NO: 20503 - protein, 5 aa, Artificial Sequence
  Description of Artificial Sequence: Synthetic peptide
  XENP019002 vhCDR1
NYWMN

SEQ ID NO: 20504 - protein, 19 aa, Artificial Sequence
  Description of Artificial Sequence: Synthetic peptide
  XENP019002 vhCDR2
EIRLKSNNYATHYAEPVKG

SEQ ID NO: 20505 - protein, 11 aa, Artificial Sequence
  Description of Artificial Sequence: Synthetic peptide
  XENP019002 vhCDR3
YYGNYGGYFDV

SEQ ID NO: 20506 - protein, 214 aa, Artificial Sequence; identical to SEQ ID NO: 16226
  Description of Artificial Sequence: Synthetic polypeptide
  XENP019002 1G6_H1.257_L1_IgG1_PVA_/S267K Light Chain

SEQ ID NO: 20507 - protein, 107 aa, Artificial Sequence; identical to SEQ ID NO: 10923
  Description of Artificial Sequence: Synthetic polypeptide
  VL of XENP019002

SEQ ID NO: 20508 - protein, 11 aa, Artificial Sequence
  Description of Artificial Sequence: Synthetic peptide
  XENP019002 vlCDR1
RASQSVSNDVA

SEQ ID NO: 20509 - protein, 7 aa, Artificial Sequence
  Description of Artificial Sequence: Synthetic peptide
  XENP019002 vlCDR2
YASHRYT

SEQ ID NO: 20510 - protein, 9 aa, Artificial Sequence
  Description of Artificial Sequence: Synthetic peptide
  XENP019002 vlCDR3
QQDYSSPRT

SEQ ID NO: 20511 - protein, 451 aa, Artificial Sequence
  Description of Artificial Sequence: Synthetic polypeptide
  XENP019003 1G6_H1.258_L1_IgG1_PVA_/S267K Heavy Chain
EVQLVESGGGLKKPGESLRLSCAASGFTFSNYWMNWVRQAPGKGLEWVGEIRLKSNNYATHYAEPVKGRFTISRDDSKSTVYLQMNSLKTEDTAVYYCTRYYGNYGGYFDVWGAGTLVTVSSASTKGPSVFPLAPSSKSTSGGTAALGCLVKDYFPEPVTVSWNSGALTSGVHTFPAVLQSSGLYSLSSVVTVPSSSLGTQTYICNVNHKPSNTKVDKKVEPKSCDKTHTCPPCPAPPVAGPSVFLFPPKPKDTLMISRTPEVTCVVVDVKHEDPEVKFNWYVDGVEVHNAKTKPREEQYNSTYRVVSVLTVLHQDWLNGKEYKCKVSNKALPAPIEKTISKAKGQPREPQVYTLPPSREEMTKNQVSLTCLVKGFYPSDIAVEWESNGQPENNYKTTPPVLDSDGSFFLYSKLTVDKSRWQQGNVFSCSVMHEALHNHYTQKSLSLSPGK

SEQ ID NO: 20512 - protein, 122 aa, Artificial Sequence; identical to SEQ ID NO: 14852
  Description of Artificial Sequence: Synthetic polypeptide
  VH of XENP019003

SEQ ID NO: 20513 - protein, 5 aa, Artificial Sequence
  Description of Artificial Sequence: Synthetic peptide
  XENP019003 vhCDR1
NYWMN

SEQ ID NO: 20514 - protein, 19 aa, Artificial Sequence
  Description of Artificial Sequence: Synthetic peptide
  XENP019003 vhCDR2
EIRLKSNNYATHYAEPVKG

SEQ ID NO: 20515 - protein, 11 aa, Artificial Sequence
  Description of Artificial Sequence: Synthetic peptide
  XENP019003 vhCDR3
YYGNYGGYFDV

SEQ ID NO: 20516 - protein, 214 aa, Artificial Sequence; identical to SEQ ID NO: 16226
  Description of Artificial Sequence: Synthetic polypeptide
  XENP019003 1G6_H1.258_L1_IgG1_PVA_/S267K Light Chain

SEQ ID NO: 20517 - protein, 107 aa, Artificial Sequence; identical to SEQ ID NO: 10923
  Description of Artificial Sequence: Synthetic polypeptide
  VL of XENP019003

SEQ ID NO: 20518 - protein, 11 aa, Artificial Sequence
  Description of Artificial Sequence: Synthetic peptide
  XENP019003 vlCDR1
RASQSVSNDVA

SEQ ID NO: 20519 - protein, 7 aa, Artificial Sequence
  Description of Artificial Sequence: Synthetic peptide
  XENP019003 vlCDR2
YASHRYT

SEQ ID NO: 20520 - protein, 9 aa, Artificial Sequence
  Description of Artificial Sequence: Synthetic peptide
  XENP019003 vlCDR3
QQDYSSPRT

SEQ ID NO: 20521 - protein, 451 aa, Artificial Sequence
  Description of Artificial Sequence: Synthetic polypeptide
  XENP019004 1G6_H1.259_L1_IgG1_PVA_/S267K Heavy Chain
EVQLVESGGGLVKPGGSLRLSCAASGFTFSNYWMDWVRQAPGKGLEWVGEIRLKSNNYATHYAEPVKGRFTISRDDSKSTVYLQMNSLKTEDTAVYYCKRYYGNYGGYFDVWGAGTLVTVSSASTKGPSVFPLAPSSKSTSGGTAALGCLVKDYFPEPVTVSWNSGALTSGVHTFPAVLQSSGLYSLSSVVTVPSSSLGTQTYICNVNHKPSNTKVDKKVEPKSCDKTHTCPPCPAPPVAGPSVFLFPPKPKDTLMISRTPEVTCVVVDVKHEDPEVKFNWYVDGVEVHNAKTKPREEQYNSTYRVVSVLTVLHQDWLNGKEYKCKVSNKALPAPIEKTISKAKGQPREPQVYTLPPSREEMTKNQVSLTCLVKGFYPSDIAVEWESNGQPENNYKTTPPVLDSDGSFFLYSKLTVDKSRWQQGNVFSCSVMHEALHNHYTQKSLSLSPGK

SEQ ID NO: 20522 - protein, 122 aa, Artificial Sequence; identical to SEQ ID NO: 14861
  Description of Artificial Sequence: Synthetic polypeptide
  VH of XENP019004

SEQ ID NO: 20523 - protein, 5 aa, Artificial Sequence
  Description of Artificial Sequence: Synthetic peptide
  XENP019004 vhCDR1
NYWMD

SEQ ID NO: 20524 - protein, 19 aa, Artificial Sequence
  Description of Artificial Sequence: Synthetic peptide
  XENP019004 vhCDR2
EIRLKSNNYATHYAEPVKG

SEQ ID NO: 20525 - protein, 11 aa, Artificial Sequence
  Description of Artificial Sequence: Synthetic peptide
  XENP019004 vhCDR3
YYGNYGGYFDV

SEQ ID NO: 20526 - protein, 214 aa, Artificial Sequence; identical to SEQ ID NO: 16226
  Description of Artificial Sequence: Synthetic polypeptide
  XENP019004 1G6_H1.259_L1_IgG1_PVA_/S267K Light Chain

SEQ ID NO: 20527 - protein, 107 aa, Artificial Sequence; identical to SEQ ID NO: 10923
  Description of Artificial Sequence: Synthetic polypeptide
  VL of XENP019004

SEQ ID NO: 20528 - protein, 11 aa, Artificial Sequence
  Description of Artificial Sequence: Synthetic peptide
  XENP019004 vlCDR1
RASQSVSNDVA

SEQ ID NO: 20529 - protein, 7 aa, Artificial Sequence
  Description of Artificial Sequence: Synthetic peptide
  XENP019004 vlCDR2
YASHRYT

SEQ ID NO: 20530 - protein, 9 aa, Artificial Sequence
  Description of Artificial Sequence: Synthetic peptide
  XENP019004 vlCDR3
QQDYSSPRT

SEQ ID NO: 20531 - protein, 451 aa, Artificial Sequence
  Description of Artificial Sequence: Synthetic polypeptide
  XENP019005 1G6_H1.260_L1_IgG1_PVA_/S267K Heavy Chain
EVQLVESGGGLVKPGESLRLSCAASGFTFSNYWMNWVRQAPGKGLEWVGEIRLKSNNYATHYAEPVKGRFTISRDDSKSTVYLQMNSRKTEDTAVYYCTRYYGNYGGYFDVWGAGTLVTVSSASTKGPSVFPLAPSSKSTSGGTAALGCLVKDYFPEPVTVSWNSGALTSGVHTFPAVLQSSGLYSLSSVVTVPSSSLGTQTYICNVNHKPSNTKVDKKVEPKSCDKTHTCPPCPAPPVAGPSVFLFPPKPKDTLMISRTPEVTCVVVDVKHEDPEVKFNWYVDGVEVHNAKTKPREEQYNSTYRVVSVLTVLHQDWLNGKEYKCKVSNKALPAPIEKTISKAKGQPREPQVYTLPPSREEMTKNQVSLTCLVKGFYPSDIAVEWESNGQPENNYKTTPPVLDSDGSFFLYSKLTVDKSRWQQGNVFSCSVMHEALHNHYTQKSLSLSPGK

SEQ ID NO: 20532 - protein, 122 aa, Artificial Sequence; identical to SEQ ID NO: 14870
  Description of Artificial Sequence: Synthetic polypeptide
  VH of XENP019005

SEQ ID NO: 20533 - protein, 5 aa, Artificial Sequence
  Description of Artificial Sequence: Synthetic peptide
  XENP019005 vhCDR1
NYWMN

SEQ ID NO: 20534 - protein, 19 aa, Artificial Sequence
  Description of Artificial Sequence: Synthetic peptide
  XENP019005 vhCDR2
EIRLKSNNYATHYAEPVKG

SEQ ID NO: 20535 - protein, 11 aa, Artificial Sequence
  Description of Artificial Sequence: Synthetic peptide
  XENP019005 vhCDR3
YYGNYGGYFDV

SEQ ID NO: 20536 - protein, 214 aa, Artificial Sequence; identical to SEQ ID NO: 16226
  Description of Artificial Sequence: Synthetic polypeptide
  XENP019005 1G6_H1.260_L1_IgG1_PVA_/S267K Light Chain

SEQ ID NO: 20537 - protein, 107 aa, Artificial Sequence; identical to SEQ ID NO: 10923
  Description of Artificial Sequence: Synthetic polypeptide
  VL of XENP019005

SEQ ID NO: 20538 - protein, 11 aa, Artificial Sequence
  Description of Artificial Sequence: Synthetic peptide
  XENP019005 vlCDR1
RASQSVSNDVA

SEQ ID NO: 20539 - protein, 7 aa, Artificial Sequence
  Description of Artificial Sequence: Synthetic peptide
  XENP019005 vlCDR2
YASHRYT

SEQ ID NO: 20540 - protein, 9 aa, Artificial Sequence
  Description of Artificial Sequence: Synthetic peptide
  XENP019005 vlCDR3
QQDYSSPRT

SEQ ID NO: 20541 - protein, 451 aa, Artificial Sequence
  Description of Artificial Sequence: Synthetic polypeptide
  XENP019006 1G6_H1.261_L1_IgG1_PVA_/S267K Heavy Chain
EVQLVESGGGLVKPGGSLRLSCKASGFTFSNYWMNWVRQAPGKGLEWVGEIRLKSNNYATHYAEPVKGRFTISRDDSKDTVYLQMNSLKTEDTAVYYCTRYYGNYGGYFDVWGAGTLVTVSSASTKGPSVFPLAPSSKSTSGGTAALGCLVKDYFPEPVTVSWNSGALTSGVHTFPAVLQSSGLYSLSSVVTVPSSSLGTQTYICNVNHKPSNTKVDKKVEPKSCDKTHTCPPCPAPPVAGPSVFLFPPKPKDTLMISRTPEVTCVVVDVKHEDPEVKFNWYVDGVEVHNAKTKPREEQYNSTYRVVSVLTVLHQDWLNGKEYKCKVSNKALPAPIEKTISKAKGQPREPQVYTLPPSREEMTKNQVSLTCLVKGFYPSDIAVEWESNGQPENNYKTTPPVLDSDGSFFLYSKLTVDKSRWQQGNVFSCSVMHEALHNHYTQKSLSLSPGK

SEQ ID NO: 20542 - protein, 122 aa, Artificial Sequence; identical to SEQ ID NO: 14879
  Description of Artificial Sequence: Synthetic polypeptide
  VH of XENP019006

SEQ ID NO: 20543 - protein, 5 aa, Artificial Sequence
  Description of Artificial Sequence: Synthetic peptide
  XENP019006 vhCDR1
NYWMN

SEQ ID NO: 20544 - protein, 19 aa, Artificial Sequence
  Description of Artificial Sequence: Synthetic peptide
  XENP019006 vhCDR2
EIRLKSNNYATHYAEPVKG

SEQ ID NO: 20545 - protein, 11 aa, Artificial Sequence
  Description of Artificial Sequence: Synthetic peptide
  XENP019006 vhCDR3
YYGNYGGYFDV

SEQ ID NO: 20546 - protein, 214 aa, Artificial Sequence; identical to SEQ ID NO: 16226
  Description of Artificial Sequence: Synthetic polypeptide
  XENP019006 1G6_H1.261_L1_IgG1_PVA_/S267K Light Chain

SEQ ID NO: 20547 - protein, 107 aa, Artificial Sequence; identical to SEQ ID NO: 10923
  Description of Artificial Sequence: Synthetic polypeptide
  VL of XENP019006

SEQ ID NO: 20548 - protein, 11 aa, Artificial Sequence
  Description of Artificial Sequence: Synthetic peptide
  XENP019006 vlCDR1
RASQSVSNDVA

SEQ ID NO: 20549 - protein, 7 aa, Artificial Sequence
  Description of Artificial Sequence: Synthetic peptide
  XENP019006 vlCDR2
YASHRYT

SEQ ID NO: 20550 - protein, 9 aa, Artificial Sequence
  Description of Artificial Sequence: Synthetic peptide
  XENP019006 vlCDR3
QQDYSSPRT

SEQ ID NO: 20551 - protein, 451 aa, Artificial Sequence
  Description of Artificial Sequence: Synthetic polypeptide
  XENP019007 1G6_H1.262_L1_IgG1_PVA_/S267K Heavy Chain
EVQLVESGGGLVKPGESLRLSCAASGFTFSNYWMNWVRQAPGKGLEWVGEIRLKSNNYATHYAEPVKGRFTISRDDSKSTVYLQMNRLKTEDTAVYYCTRYYGNYGGYFDVWGAGTLVTVSSASTKGPSVFPLAPSSKSTSGGTAALGCLVKDYFPEPVTVSWNSGALTSGVHTFPAVLQSSGLYSLSSVVTVPSSSLGTQTYICNVNHKPSNTKVDKKVEPKSCDKTHTCPPCPAPPVAGPSVFLFPPKPKDTLMISRTPEVTCVVVDVKHEDPEVKFNWYVDGVEVHNAKTKPREEQYNSTYRVVSVLTVLHQDWLNGKEYKCKVSNKALPAPIEKTISKAKGQPREPQVYTLPPSREEMTKNQVSLTCLVKGFYPSDIAVEWESNGQPENNYKTTPPVLDSDGSFFLYSKLTVDKSRWQQGNVFSCSVMHEALHNHYTQKSLSLSPGK

SEQ ID NO: 20552 - protein, 122 aa, Artificial Sequence; identical to SEQ ID NO: 14888
  Description of Artificial Sequence: Synthetic polypeptide
  VH of XENP019007

SEQ ID NO: 20553 - protein, 5 aa, Artificial Sequence
  Description of Artificial Sequence: Synthetic peptide
  XENP019007 vhCDR1
NYWMN

SEQ ID NO: 20554 - protein, 19 aa, Artificial Sequence
  Description of Artificial Sequence: Synthetic peptide
  XENP019007 vhCDR2
EIRLKSNNYATHYAEPVKG

SEQ ID NO: 20555 - protein, 11 aa, Artificial Sequence
  Description of Artificial Sequence: Synthetic peptide
  XENP019007 vhCDR3
YYGNYGGYFDV

SEQ ID NO: 20556 - protein, 214 aa, Artificial Sequence; identical to SEQ ID NO: 16226
  Description of Artificial Sequence: Synthetic polypeptide
  XENP019007 1G6_H1.262_L1_IgG1_PVA_/S267K Light Chain

SEQ ID NO: 20557 - protein, 107 aa, Artificial Sequence; identical to SEQ ID NO: 10923
  Description of Artificial Sequence: Synthetic polypeptide
  VL of XENP019007

SEQ ID NO: 20558 - protein, 11 aa, Artificial Sequence
  Description of Artificial Sequence: Synthetic peptide
  XENP019007 vlCDR1
RASQSVSNDVA

SEQ ID NO: 20559 - protein, 7 aa, Artificial Sequence
  Description of Artificial Sequence: Synthetic peptide
  XENP019007 vlCDR2
YASHRYT

SEQ ID NO: 20560 - protein, 9 aa, Artificial Sequence
  Description of Artificial Sequence: Synthetic peptide
  XENP019007 vlCDR3
QQDYSSPRT

SEQ ID NO: 20561 - protein, 451 aa, Artificial Sequence
  Description of Artificial Sequence: Synthetic polypeptide
  XENP019008 1G6_H1.263_L1_IgG1_PVA_/S267K Heavy Chain
EVQLVESGGGLVKPGGSLRLSCAASGFTFSNYWMNWVRQAPGKGLEWVGEIRLKSNNYATHYAEKVKGLFTISRDDSKSTVYLQMNSLKTEDTAVYYCTRYYGNYGGYFDVWGAGTLVTVSSASTKGPSVFPLAPSSKSTSGGTAALGCLVKDYFPEPVTVSWNSGALTSGVHTFPAVLQSSGLYSLSSVVTVPSSSLGTQTYICNVNHKPSNTKVDKKVEPKSCDKTHTCPPCPAPPVAGPSVFLFPPKPKDTLMISRTPEVTCVVVDVKHEDPEVKFNWYVDGVEVHNAKTKPREEQYNSTYRVVSVLTVLHQDWLNGKEYKCKVSNKALPAPIEKTISKAKGQPREPQVYTLPPSREEMTKNQVSLTCLVKGFYPSDIAVEWESNGQPENNYKTTPPVLDSDGSFFLYSKLTVDKSRWQQGNVFSCSVMHEALHNHYTQKSLSLSPGK

SEQ ID NO: 20562 - protein, 122 aa, Artificial Sequence; identical to SEQ ID NO: 14897
  Description of Artificial Sequence: Synthetic polypeptide
  VH of XENP019008

SEQ ID NO: 20563 - protein, 5 aa, Artificial Sequence
  Description of Artificial Sequence: Synthetic peptide
  XENP019008 vhCDR1
NYWMN

SEQ ID NO: 20564 - protein, 19 aa, Artificial Sequence
  Description of Artificial Sequence: Synthetic peptide
  XENP019008 vhCDR2
EIRLKSNNYATHYAEKVKG

SEQ ID NO: 20565 - protein, 11 aa, Artificial Sequence
  Description of Artificial Sequence: Synthetic peptide
  XENP019008 vhCDR3
YYGNYGGYFDV

SEQ ID NO: 20566 - protein, 214 aa, Artificial Sequence; identical to SEQ ID NO: 16226
  Description of Artificial Sequence: Synthetic polypeptide
  XENP019008 1G6_H1.263_L1_IgG1_PVA_/S267K Light Chain

SEQ ID NO: 20567 - protein, 107 aa, Artificial Sequence; identical to SEQ ID NO: 10923
  Description of Artificial Sequence: Synthetic polypeptide
  VL of XENP019008

SEQ ID NO: 20568 - protein, 11 aa, Artificial Sequence
  Description of Artificial Sequence: Synthetic peptide
  XENP019008 vlCDR1
RASQSVSNDVA

SEQ ID NO: 20569 - protein, 7 aa, Artificial Sequence
  Description of Artificial Sequence: Synthetic peptide
  XENP019008 vlCDR2
YASHRYT

SEQ ID NO: 20570 - protein, 9 aa, Artificial Sequence
  Description of Artificial Sequence: Synthetic peptide
  XENP019008 vlCDR3
QQDYSSPRT

SEQ ID NO: 20571 - protein, 451 aa, Artificial Sequence
  Description of Artificial Sequence: Synthetic polypeptide
  XENP019009 1G6_H1.264_L1_IgG1_PVA_/S267K Heavy Chain
EVQLVESGGGLVKPGGSLRLSCKASGDTFSNYWMNWVRQAPGKGLEWVGEIRLKSNNYATHYAEPVKGRFTISRDDSKSTVYLQMNSLKTEDTAVYYCTRYYGNYGGYFDVWGAGTLVTVSSASTKGPSVFPLAPSSKSTSGGTAALGCLVKDYFPEPVTVSWNSGALTSGVHTFPAVLQSSGLYSLSSVVTVPSSSLGTQTYICNVNHKPSNTKVDKKVEPKSCDKTHTCPPCPAPPVAGPSVFLFPPKPKDTLMISRTPEVTCVVVDVKHEDPEVKFNWYVDGVEVHNAKTKPREEQYNSTYRVVSVLTVLHQDWLNGKEYKCKVSNKALPAPIEKTISKAKGQPREPQVYTLPPSREEMTKNQVSLTCLVKGFYPSDIAVEWESNGQPENNYKTTPPVLDSDGSFFLYSKLTVDKSRWQQGNVFSCSVMHEALHNHYTQKSLSLSPGK

SEQ ID NO: 20572 - protein, 122 aa, Artificial Sequence; identical to SEQ ID NO: 14906
  Description of Artificial Sequence: Synthetic polypeptide
  VH of XENP019009

SEQ ID NO: 20573 - protein, 5 aa, Artificial Sequence
  Description of Artificial Sequence: Synthetic peptide
  XENP019009 vhCDR1
NYWMN

SEQ ID NO: 20574 - protein, 19 aa, Artificial Sequence
  Description of Artificial Sequence: Synthetic peptide
  XENP019009 vhCDR2
EIRLKSNNYATHYAEPVKG

SEQ ID NO: 20575 - protein, 11 aa, Artificial Sequence
  Description of Artificial Sequence: Synthetic peptide
  XENP019009 vhCDR3
YYGNYGGYFDV

SEQ ID NO: 20576 - protein, 214 aa, Artificial Sequence; identical to SEQ ID NO: 16226
  Description of Artificial Sequence: Synthetic polypeptide
  XENP019009 1G6_H1.264_L1_IgG1_PVA_/S267K Light Chain

SEQ ID NO: 20577 - protein, 107 aa, Artificial Sequence; identical to SEQ ID NO: 10923
  Description of Artificial Sequence: Synthetic polypeptide
  VL of XENP019009

SEQ ID NO: 20578 - protein, 11 aa, Artificial Sequence
  Description of Artificial Sequence: Synthetic peptide
  XENP019009 vlCDR1
RASQSVSNDVA

SEQ ID NO: 20579 - protein, 7 aa, Artificial Sequence
  Description of Artificial Sequence: Synthetic peptide
  XENP019009 vlCDR2
YASHRYT

SEQ ID NO: 20580 - protein, 9 aa, Artificial Sequence
  Description of Artificial Sequence: Synthetic peptide
  XENP019009 vlCDR3
QQDYSSPRT

SEQ ID NO: 20581 - protein, 451 aa, Artificial Sequence
  Description of Artificial Sequence: Synthetic polypeptide
  XENP019010 1G6_H1.265_L1_IgG1_PVA_/S267K Heavy Chain
EVQLVESGGGLVKPGESLRLSCAASGFTFSNYWMNWVRQAPGKGLEWVGEIRLKSNNYATHYAEPVKGRFTISRDDSKSTVYLKMNSLKTEDTAVYYCTRYYGNYGGYFDVWGAGTLVTVSSASTKGPSVFPLAPSSKSTSGGTAALGCLVKDYFPEPVTVSWNSGALTSGVHTFPAVLQSSGLYSLSSVVTVPSSSLGTQTYICNVNHKPSNTKVDKKVEPKSCDKTHTCPPCPAPPVAGPSVFLFPPKPKDTLMISRTPEVTCVVVDVKHEDPEVKFNWYVDGVEVHNAKTKPREEQYNSTYRVVSVLTVLHQDWLNGKEYKCKVSNKALPAPIEKTISKAKGQPREPQVYTLPPSREEMTKNQVSLTCLVKGFYPSDIAVEWESNGQPENNYKTTPPVLDSDGSFFLYSKLTVDKSRWQQGNVFSCSVMHEALHNHYTQKSLSLSPGK

SEQ ID NO: 20582 - protein, 122 aa, Artificial Sequence; identical to SEQ ID NO: 14915
  Description of Artificial Sequence: Synthetic polypeptide
  VH of XENP019010

SEQ ID NO: 20583 - protein, 5 aa, Artificial Sequence
  Description of Artificial Sequence: Synthetic peptide
  XENP019010 vhCDR1
NYWMN

SEQ ID NO: 20584 - protein, 19 aa, Artificial Sequence
  Description of Artificial Sequence: Synthetic peptide
  XENP019010 vhCDR2
EIRLKSNNYATHYAEPVKG

SEQ ID NO: 20585 - protein, 11 aa, Artificial Sequence
  Description of Artificial Sequence: Synthetic peptide
  XENP019010 vhCDR3
YYGNYGGYFDV

SEQ ID NO: 20586 - protein, 214 aa, Artificial Sequence; identical to SEQ ID NO: 16226
  Description of Artificial Sequence: Synthetic polypeptide
  XENP019010 1G6_H1.265_L1_IgG1_PVA_/S267K Light Chain

SEQ ID NO: 20587 - protein, 107 aa, Artificial Sequence; identical to SEQ ID NO: 10923
  Description of Artificial Sequence: Synthetic polypeptide
  VL of XENP019010

SEQ ID NO: 20588 - protein, 11 aa, Artificial Sequence
  Description of Artificial Sequence: Synthetic peptide
  XENP019010 vlCDR1
RASQSVSNDVA

SEQ ID NO: 20589 - protein, 7 aa, Artificial Sequence
  Description of Artificial Sequence: Synthetic peptide
  XENP019010 vlCDR2
YASHRYT

SEQ ID NO: 20590 - protein, 9 aa, Artificial Sequence
  Description of Artificial Sequence: Synthetic peptide
  XENP019010 vlCDR3
QQDYSSPRT

SEQ ID NO: 20591 - protein, 451 aa, Artificial Sequence
  Description of Artificial Sequence: Synthetic polypeptide
  XENP019011 1G6_H1.266_L1_IgG1_PVA_/S267K Heavy Chain
EVQLVESGGGLVKPGGSLRLSCAASGFTFSNYWMNWVRQAPGKGLEWVGEIRLKSNNYATHYAQPVKDRFTISRDDSKSTVYLQMNSLKTEDTAVYYCTRYYGNYGGYFDVWGAGTLVTVSSASTKGPSVFPLAPSSKSTSGGTAALGCLVKDYFPEPVTVSWNSGALTSGVHTFPAVLQSSGLYSLSSVVTVPSSSLGTQTYICNVNHKPSNTKVDKKVEPKSCDKTHTCPPCPAPPVAGPSVFLFPPKPKDTLMISRTPEVTCVVVDVKHEDPEVKFNWYVDGVEVHNAKTKPREEQYNSTYRVVSVLTVLHQDWLNGKEYKCKVSNKALPAPIEKTISKAKGQPREPQVYTLPPSREEMTKNQVSLTCLVKGFYPSDIAVEWESNGQPENNYKTTPPVLDSDGSFFLYSKLTVDKSRWQQGNVFSCSVMHEALHNHYTQKSLSLSPGK

SEQ ID NO: 20592 - protein, 122 aa, Artificial Sequence; identical to SEQ ID NO: 14924
  Description of Artificial Sequence: Synthetic polypeptide
  VH of XENP019011

SEQ ID NO: 20593 - protein, 5 aa, Artificial Sequence
  Description of Artificial Sequence: Synthetic peptide
  XENP019011 vhCDR1
NYWMN

SEQ ID NO: 20594 - protein, 19 aa, Artificial Sequence
  Description of Artificial Sequence: Synthetic peptide
  XENP019011 vhCDR2
EIRLKSNNYATHYAQPVKD

SEQ ID NO: 20595 - protein, 11 aa, Artificial Sequence
  Description of Artificial Sequence: Synthetic peptide
  XENP019011 vhCDR3
YYGNYGGYFDV

SEQ ID NO: 20596 - protein, 214 aa, Artificial Sequence; identical to SEQ ID NO: 16226
  Description of Artificial Sequence: Synthetic polypeptide
  XENP019011 1G6_H1.266_L1_IgG1_PVA_/S267K Light Chain

SEQ ID NO: 20597 - protein, 107 aa, Artificial Sequence; identical to SEQ ID NO: 10923
  Description of Artificial Sequence: Synthetic polypeptide
  VL of XENP019011

SEQ ID NO: 20598 - protein, 11 aa, Artificial Sequence
  Description of Artificial Sequence: Synthetic peptide
  XENP019011 vlCDR1
RASQSVSNDVA

SEQ ID NO: 20599 - protein, 7 aa, Artificial Sequence
  Description of Artificial Sequence: Synthetic peptide
  XENP019011 vlCDR2
YASHRYT

SEQ ID NO: 20600 - protein, 9 aa, Artificial Sequence
  Description of Artificial Sequence: Synthetic peptide
  XENP019011 vlCDR3
QQDYSSPRT

SEQ ID NO: 20601 - protein, 451 aa, Artificial Sequence
  Description of Artificial Sequence: Synthetic polypeptide
  XENP019012 1G6_H1.267_L1_IgG1_PVA_/S267K Heavy Chain
EVQLVESGGGLVKPGGSLRLSCAASGFTFSNYWMNWVRQAPGKGLEWVGEIRLKSNNYATHYAEPVKGRFTISRDDSKSTVYLEMNSRKTEDTAVYYCTRYYGNYGGYFDVWGAGTLVTVSSASTKGPSVFPLAPSSKSTSGGTAALGCLVKDYFPEPVTVSWNSGALTSGVHTFPAVLQSSGLYSLSSVVTVPSSSLGTQTYICNVNHKPSNTKVDKKVEPKSCDKTHTCPPCPAPPVAGPSVFLFPPKPKDTLMISRTPEVTCVVVDVKHEDPEVKFNWYVDGVEVHNAKTKPREEQYNSTYRVVSVLTVLHQDWLNGKEYKCKVSNKALPAPIEKTISKAKGQPREPQVYTLPPSREEMTKNQVSLTCLVKGFYPSDIAVEWESNGQPENNYKTTPPVLDSDGSFFLYSKLTVDKSRWQQGNVFSCSVMHEALHNHYTQKSLSLSPGK

SEQ ID NO: 20602 - protein, 122 aa, Artificial Sequence; identical to SEQ ID NO: 14933
  Description of Artificial Sequence: Synthetic polypeptide
  VH of XENP019012

SEQ ID NO: 20603 - protein, 5 aa, Artificial Sequence
  Description of Artificial Sequence: Synthetic peptide
  XENP019012 vhCDR1
NYWMN

SEQ ID NO: 20604 - protein, 19 aa, Artificial Sequence
  Description of Artificial Sequence: Synthetic peptide
  XENP019012 vhCDR2
EIRLKSNNYATHYAEPVKG

SEQ ID NO: 20605 - protein, 11 aa, Artificial Sequence
  Description of Artificial Sequence: Synthetic peptide
  XENP019012 vhCDR3
YYGNYGGYFDV

SEQ ID NO: 20606 - protein, 214 aa, Artificial Sequence; identical to SEQ ID NO: 16226
  Description of Artificial Sequence: Synthetic polypeptide
  XENP019012 1G6_H1.267_L1_IgG1_PVA_/S267K Light Chain

SEQ ID NO: 20607 - protein, 107 aa, Artificial Sequence; identical to SEQ ID NO: 10923
  Description of Artificial Sequence: Synthetic polypeptide
  VL of XENP019012

SEQ ID NO: 20608 - protein, 11 aa, Artificial Sequence
  Description of Artificial Sequence: Synthetic peptide
  XENP019012 vlCDR1
RASQSVSNDVA

SEQ ID NO: 20609 - protein, 7 aa, Artificial Sequence
  Description of Artificial Sequence: Synthetic peptide
  XENP019012 vlCDR2
YASHRYT

SEQ ID NO: 20610 - protein, 9 aa, Artificial Sequence
  Description of Artificial Sequence: Synthetic peptide
  XENP019012 vlCDR3
QQDYSSPRT

SEQ ID NO: 20611 - protein, 451 aa, Artificial Sequence
  Description of Artificial Sequence: Synthetic polypeptide
  XENP019013 1G6_H1.268_L1_IgG1_PVA_/S267K Heavy Chain
EVQLVESGGGLVKPGESLRLSCAASGFTFSNYWMNWVRQAPGKGLEWVGEIRLKSNNYATHYAEPVKGRFTISRDDSKSTVYLQMRSLKTEDTAVYYCTRYYGNYGGYFDVWGAGTLVTVSSASTKGPSVFPLAPSSKSTSGGTAALGCLVKDYFPEPVTVSWNSGALTSGVHTFPAVLQSSGLYSLSSVVTVPSSSLGTQTYICNVNHKPSNTKVDKKVEPKSCDKTHTCPPCPAPPVAGPSVFLFPPKPKDTLMISRTPEVTCVVVDVKHEDPEVKFNWYVDGVEVHNAKTKPREEQYNSTYRVVSVLTVLHQDWLNGKEYKCKVSNKALPAPIEKTISKAKGQPREPQVYTLPPSREEMTKNQVSLTCLVKGFYPSDIAVEWESNGQPENNYKTTPPVLDSDGSFFLYSKLTVDKSRWQQGNVFSCSVMHEALHNHYTQKSLSLSPGK

SEQ ID NO: 20612 - protein, 122 aa, Artificial Sequence; identical to SEQ ID NO: 14942
  Description of Artificial Sequence: Synthetic polypeptide
  VH of XENP019013

SEQ ID NO: 20613 - protein, 5 aa, Artificial Sequence
  Description of Artificial Sequence: Synthetic peptide
  XENP019013 vhCDR1
NYWMN

SEQ ID NO: 20614 - protein, 19 aa, Artificial Sequence
  Description of Artificial Sequence: Synthetic peptide
  XENP019013 vhCDR2
EIRLKSNNYATHYAEPVKG

SEQ ID NO: 20615 - protein, 11 aa, Artificial Sequence
  Description of Artificial Sequence: Synthetic peptide
  XENP019013 vhCDR3
YYGNYGGYFDV

SEQ ID NO: 20616 - protein, 214 aa, Artificial Sequence; identical to SEQ ID NO: 16226
  Description of Artificial Sequence: Synthetic polypeptide
  XENP019013 1G6_H1.268_L1_IgG1_PVA_/S267K Light Chain

SEQ ID NO: 20617 - protein, 107 aa, Artificial Sequence; identical to SEQ ID NO: 10923
  Description of Artificial Sequence: Synthetic polypeptide
  VL of XENP019013

SEQ ID NO: 20618 - protein, 11 aa, Artificial Sequence
  Description of Artificial Sequence: Synthetic peptide
  XENP019013 vlCDR1
RASQSVSNDVA

SEQ ID NO: 20619 - protein, 7 aa, Artificial Sequence
  Description of Artificial Sequence: Synthetic peptide
  XENP019013 vlCDR2
YASHRYT

SEQ ID NO: 20620 - protein, 9 aa, Artificial Sequence
  Description of Artificial Sequence: Synthetic peptide
  XENP019013 vlCDR3
QQDYSSPRT

SEQ ID NO: 20621 - protein, 451 aa, Artificial Sequence
  Description of Artificial Sequence: Synthetic polypeptide
  XENP019014 1G6_H1.269_L1_IgG1_PVA_/S267K Heavy Chain
EVQLVESGGGLVKPGGSLRLSCAASGFTFSNFWMNWVRQAPGKGLEWVGEIRLYSNNYATHYAEPVKGRFTISRDDSKSTVYLQMNSLKTEDTAVYYCTRYYGNYGGYFDVWGAGTLVTVSSASTKGPSVFPLAPSSKSTSGGTAALGCLVKDYFPEPVTVSWNSGALTSGVHTFPAVLQSSGLYSLSSVVTVPSSSLGTQTYICNVNHKPSNTKVDKKVEPKSCDKTHTCPPCPAPPVAGPSVFLFPPKPKDTLMISRTPEVTCVVVDVKHEDPEVKFNWYVDGVEVHNAKTKPREEQYNSTYRVVSVLTVLHQDWLNGKEYKCKVSNKALPAPIEKTISKAKGQPREPQVYTLPPSREEMTKNQVSLTCLVKGFYPSDIAVEWESNGQPENNYKTTPPVLDSDGSFFLYSKLTVDKSRWQQGNVFSCSVMHEALHNHYTQKSLSLSPGK

SEQ ID NO: 20622 - protein, 122 aa, Artificial Sequence; identical to SEQ ID NO: 14951
  Description of Artificial Sequence: Synthetic polypeptide
  VH of XENP019014

SEQ ID NO: 20623 - protein, 5 aa, Artificial Sequence
  Description of Artificial Sequence: Synthetic peptide
  XENP019014 vhCDR1
NFWMN

SEQ ID NO: 20624 - protein, 19 aa, Artificial Sequence
  Description of Artificial Sequence: Synthetic peptide
  XENP019014 vhCDR2
EIRLYSNNYATHYAEPVKG

SEQ ID NO: 20625 - protein, 11 aa, Artificial Sequence
  Description of Artificial Sequence: Synthetic peptide
  XENP019014 vhCDR3
YYGNYGGYFDV

SEQ ID NO: 20626 - protein, 214 aa, Artificial Sequence; identical to SEQ ID NO: 16226
  Description of Artificial Sequence: Synthetic polypeptide
  XENP019014 1G6_H1.269_L1_IgG1_PVA_/S267K Light Chain

SEQ ID NO: 20627 - protein, 107 aa, Artificial Sequence; identical to SEQ ID NO: 10923
  Description of Artificial Sequence: Synthetic polypeptide
  VL of XENP019014

SEQ ID NO: 20628 - protein, 11 aa, Artificial Sequence
  Description of Artificial Sequence: Synthetic peptide
  XENP019014 vlCDR1
RASQSVSNDVA

SEQ ID NO: 20629 - protein, 7 aa, Artificial Sequence
  Description of Artificial Sequence: Synthetic peptide
  XENP019014 vlCDR2
YASHRYT

SEQ ID NO: 20630 - protein, 9 aa, Artificial Sequence
  Description of Artificial Sequence: Synthetic peptide
  XENP019014 vlCDR3
QQDYSSPRT

SEQ ID NO: 20631 - protein, 451 aa, Artificial Sequence
  Description of Artificial Sequence: Synthetic polypeptide
  XENP019015 1G6_H1.270_L1_IgG1_PVA_/S267K Heavy Chain
EVQLVESGGGLVKPGGSLRLSCAASGFTFSNYWMNWVRQAPGKGLEWVGEIRWYSNNYATHYAEPVKGRFTISRDDSKSTVYLQMNSLKTEDTAVYYCTRYYGNYGGYFDVWGAGTLVTVSSASTKGPSVFPLAPSSKSTSGGTAALGCLVKDYFPEPVTVSWNSGALTSGVHTFPAVLQSSGLYSLSSVVTVPSSSLGTQTYICNVNHKPSNTKVDKKVEPKSCDKTHTCPPCPAPPVAGPSVFLFPPKPKDTLMISRTPEVTCVVVDVKHEDPEVKFNWYVDGVEVHNAKTKPREEQYNSTYRVVSVLTVLHQDWLNGKEYKCKVSNKALPAPIEKTISKAKGQPREPQVYTLPPSREEMTKNQVSLTCLVKGFYPSDIAVEWESNGQPENNYKTTPPVLDSDGSFFLYSKLTVDKSRWQQGNVFSCSVMHEALHNHYTQKSLSLSPGK

SEQ ID NO: 20632 - protein, 122 aa, Artificial Sequence; identical to SEQ ID NO: 14960
  Description of Artificial Sequence: Synthetic polypeptide
  VH of XENP019015

SEQ ID NO: 20633 - protein, 5 aa, Artificial Sequence
  Description of Artificial Sequence: Synthetic peptide
  XENP019015 vhCDR1
NYWMN

SEQ ID NO: 20634 - protein, 19 aa, Artificial Sequence
  Description of Artificial Sequence: Synthetic peptide
  XENP019015 vhCDR2
EIRWYSNNYATHYAEPVKG

SEQ ID NO: 20635 - protein, 11 aa, Artificial Sequence
  Description of Artificial Sequence: Synthetic peptide
  XENP019015 vhCDR3
YYGNYGGYFDV

SEQ ID NO: 20636 - protein, 214 aa, Artificial Sequence; identical to SEQ ID NO: 16226
  Description of Artificial Sequence: Synthetic polypeptide
  XENP019015 1G6_H1.270_L1_IgG1_PVA_/S267K Light Chain

SEQ ID NO: 20637 - protein, 107 aa, Artificial Sequence; identical to SEQ ID NO: 10923
  Description of Artificial Sequence: Synthetic polypeptide
  VL of XENP019015

SEQ ID NO: 20638 - protein, 11 aa, Artificial Sequence
  Description of Artificial Sequence: Synthetic peptide
  XENP019015 vlCDR1
RASQSVSNDVA

SEQ ID NO: 20639 - protein, 7 aa, Artificial Sequence
  Description of Artificial Sequence: Synthetic peptide
  XENP019015 vlCDR2
YASHRYT

SEQ ID NO: 20640 - protein, 9 aa, Artificial Sequence
  Description of Artificial Sequence: Synthetic peptide
  XENP019015 vlCDR3
QQDYSSPRT

SEQ ID NO: 20641 - protein, 451 aa, Artificial Sequence
  Description of Artificial Sequence: Synthetic polypeptide
  XENP019016 1G6_H1.271_L1_IgG1_PVA_/S267K Heavy Chain
EVQLVESGGGLVKPGGSLRLSCAASGFTFSNYWMNWVRQAPGKGLEWVGEIRLYSNNYATHYAEPVKGRFTISRDDSKSTLYLQMNSLKTEDTAVYYCTRYYGNYGGYFDVWGAGTLVTVSSASTKGPSVFPLAPSSKSTSGGTAALGCLVKDYFPEPVTVSWNSGALTSGVHTFPAVLQSSGLYSLSSVVTVPSSSLGTQTYICNVNHKPSNTKVDKKVEPKSCDKTHTCPPCPAPPVAGPSVFLFPPKPKDTLMISRTPEVTCVVVDVKHEDPEVKFNWYVDGVEVHNAKTKPREEQYNSTYRVVSVLTVLHQDWLNGKEYKCKVSNKALPAPIEKTISKAKGQPREPQVYTLPPSREEMTKNQVSLTCLVKGFYPSDIAVEWESNGQPENNYKTTPPVLDSDGSFFLYSKLTVDKSRWQQGNVFSCSVMHEALHNHYTQKSLSLSPGK

SEQ ID NO: 20642 - protein, 122 aa, Artificial Sequence; identical to SEQ ID NO: 14969
  Description of Artificial Sequence: Synthetic polypeptide
  VH of XENP019016

SEQ ID NO: 20643 - protein, 5 aa, Artificial Sequence
  Description of Artificial Sequence: Synthetic peptide
  XENP019016 vhCDR1
NYWMN

SEQ ID NO: 20644 - protein, 19 aa, Artificial Sequence
  Description of Artificial Sequence: Synthetic peptide
  XENP019016 vhCDR2
EIRLYSNNYATHYAEPVKG

SEQ ID NO: 20645 - protein, 11 aa, Artificial Sequence
  Description of Artificial Sequence: Synthetic peptide
  XENP019016 vhCDR3
YYGNYGGYFDV

SEQ ID NO: 20646 - protein, 214 aa, Artificial Sequence; identical to SEQ ID NO: 16226
  Description of Artificial Sequence: Synthetic polypeptide
  XENP019016 1G6_H1.271_L1_IgG1_PVA_/S267K Light Chain

SEQ ID NO: 20647 - protein, 107 aa, Artificial Sequence; identical to SEQ ID NO: 10923
  Description of Artificial Sequence: Synthetic polypeptide
  VL of XENP019016

SEQ ID NO: 20648 - protein, 11 aa, Artificial Sequence
  Description of Artificial Sequence: Synthetic peptide
  XENP019016 vlCDR1
RASQSVSNDVA

SEQ ID NO: 20649 - protein, 7 aa, Artificial Sequence
  Description of Artificial Sequence: Synthetic peptide
  XENP019016 vlCDR2
YASHRYT

SEQ ID NO: 20650 - protein, 9 aa, Artificial Sequence
  Description of Artificial Sequence: Synthetic peptide
  XENP019016 vlCDR3
QQDYSSPRT

SEQ ID NO: 20651 - protein, 451 aa, Artificial Sequence
  Description of Artificial Sequence: Synthetic polypeptide
  XENP019017 1G6_H1.272_L1_IgG1_PVA_/S267K Heavy Chain
EVQLVESGGGLVKPGGSLRLSCAASGFTFSNFWMNWVRQAPGKGLEWVGEIRLYSNNYATHYAEPVKGRFTISRDDSKSTLYLQMNSLKTEDTAVYYCTRYYGNYGGYFDVWGAGTLVTVSSASTKGPSVFPLAPSSKSTSGGTAALGCLVKDYFPEPVTVSWNSGALTSGVHTFPAVLQSSGLYSLSSVVTVPSSSLGTQTYICNVNHKPSNTKVDKKVEPKSCDKTHTCPPCPAPPVAGPSVFLFPPKPKDTLMISRTPEVTCVVVDVKHEDPEVKFNWYVDGVEVHNAKTKPREEQYNSTYRVVSVLTVLHQDWLNGKEYKCKVSNKALPAPIEKTISKAKGQPREPQVYTLPPSREEMTKNQVSLTCLVKGFYPSDIAVEWESNGQPENNYKTTPPVLDSDGSFFLYSKLTVDKSRWQQGNVFSCSVMHEALHNHYTQKSLSLSPGK

SEQ ID NO: 20652 - protein, 122 aa, Artificial Sequence; identical to SEQ ID NO: 14978
  Description of Artificial Sequence: Synthetic polypeptide
  VH of XENP019017

SEQ ID NO: 20653 - protein, 5 aa, Artificial Sequence
  Description of Artificial Sequence: Synthetic peptide
  XENP019017 vhCDR1
NFWMN

SEQ ID NO: 20654 - protein, 19 aa, Artificial Sequence
  Description of Artificial Sequence: Synthetic peptide
  XENP019017 vhCDR2
EIRLYSNNYATHYAEPVKG

SEQ ID NO: 20655 - protein, 11 aa, Artificial Sequence
  Description of Artificial Sequence: Synthetic peptide
  XENP019017 vhCDR3
YYGNYGGYFDV

SEQ ID NO: 20656 - protein, 214 aa, Artificial Sequence; identical to SEQ ID NO: 16226
  Description of Artificial Sequence: Synthetic polypeptide
  XENP019017 1G6_H1.272_L1_IgG1_PVA_/S267K Light Chain

SEQ ID NO: 20657 - protein, 107 aa, Artificial Sequence; identical to SEQ ID NO: 10923
  Description of Artificial Sequence: Synthetic polypeptide
  VL of XENP019017

SEQ ID NO: 20658 - protein, 11 aa, Artificial Sequence
  Description of Artificial Sequence: Synthetic peptide
  XENP019017 vlCDR1
RASQSVSNDVA

SEQ ID NO: 20659 - protein, 7 aa, Artificial Sequence
  Description of Artificial Sequence: Synthetic peptide
  XENP019017 vlCDR2
YASHRYT

SEQ ID NO: 20660 - protein, 9 aa, Artificial Sequence
  Description of Artificial Sequence: Synthetic peptide
  XENP019017 vlCDR3
QQDYSSPRT

SEQ ID NO: 20661 - protein, 451 aa, Artificial Sequence
  Description of Artificial Sequence: Synthetic polypeptide
  XENP019018 1G6_H1.273_L1_IgG1_PVA_/S267K Heavy Chain
EVQLVESGGGLVKPGGSLRLSCAASGFTFSNFWMNWVRQAPGKGLEWVGEIRWKSNNYATHYAEPVKGRFTISRDDSKSTLYLQMNSLKTEDTAVYYCTRYYGNYGGYFDVWGAGTLVTVSSASTKGPSVFPLAPSSKSTSGGTAALGCLVKDYFPEPVTVSWNSGALTSGVHTFPAVLQSSGLYSLSSVVTVPSSSLGTQTYICNVNHKPSNTKVDKKVEPKSCDKTHTCPPCPAPPVAGPSVFLFPPKPKDTLMISRTPEVTCVVVDVKHEDPEVKFNWYVDGVEVHNAKTKPREEQYNSTYRVVSVLTVLHQDWLNGKEYKCKVSNKALPAPIEKTISKAKGQPREPQVYTLPPSREEMTKNQVSLTCLVKGFYPSDIAVEWESNGQPENNYKTTPPVLDSDGSFFLYSKLTVDKSRWQQGNVFSCSVMHEALHNHYTQKSLSLSPGK

SEQ ID NO: 20662 - protein, 122 aa, Artificial Sequence; identical to SEQ ID NO: 14987
  Description of Artificial Sequence: Synthetic polypeptide
  VH of XENP019018

SEQ ID NO: 20663 - protein, 5 aa, Artificial Sequence
  Description of Artificial Sequence: Synthetic peptide
  XENP019018 vhCDR1
NFWMN

SEQ ID NO: 20664 - protein, 19 aa, Artificial Sequence
  Description of Artificial Sequence: Synthetic peptide
  XENP019018 vhCDR2
EIRWKSNNYATHYAEPVKG

SEQ ID NO: 20665 - protein, 11 aa, Artificial Sequence
  Description of Artificial Sequence: Synthetic peptide
  XENP019018 vhCDR3
YYGNYGGYFDV

SEQ ID NO: 20666 - protein, 214 aa, Artificial Sequence; identical to SEQ ID NO: 16226
  Description of Artificial Sequence: Synthetic polypeptide
  XENP019018 1G6_H1.273_L1_IgG1_PVA_/S267K Light Chain

SEQ ID NO: 20667 - protein, 107 aa, Artificial Sequence; identical to SEQ ID NO: 10923
  Description of Artificial Sequence: Synthetic polypeptide
  VL of XENP019018

SEQ ID NO: 20668 - protein, 11 aa, Artificial Sequence
  Description of Artificial Sequence: Synthetic peptide
  XENP019018 vlCDR1
RASQSVSNDVA

SEQ ID NO: 20669 - protein, 7 aa, Artificial Sequence
  Description of Artificial Sequence: Synthetic peptide
  XENP019018 vlCDR2
YASHRYT

SEQ ID NO: 20670 - protein, 9 aa, Artificial Sequence
  Description of Artificial Sequence: Synthetic peptide
  XENP019018 vlCDR3
QQDYSSPRT

SEQ ID NO: 20671 - protein, 451 aa, Artificial Sequence
  Description of Artificial Sequence: Synthetic polypeptide
  XENP019019 1G6_H1.274_L1_IgG1_PVA_/S267K Heavy Chain
EVQLVESGGGLVKPGGSLRLSCAASGFTFSNFWMNWVRQAPGKGLEWVGEIRLKKNNYATHYAEPVKGRFTISRDDSKSTLYLQMNSLKTEDTAVYYCTRYYGNYGGYFDVWGAGTLVTVSSASTKGPSVFPLAPSSKSTSGGTAALGCLVKDYFPEPVTVSWNSGALTSGVHTFPAVLQSSGLYSLSSVVTVPSSSLGTQTYICNVNHKPSNTKVDKKVEPKSCDKTHTCPPCPAPPVAGPSVFLFPPKPKDTLMISRTPEVTCVVVDVKHEDPEVKFNWYVDGVEVHNAKTKPREEQYNSTYRVVSVLTVLHQDWLNGKEYKCKVSNKALPAPIEKTISKAKGQPREPQVYTLPPSREEMTKNQVSLTCLVKGFYPSDIAVEWESNGQPENNYKTTPPVLDSDGSFFLYSKLTVDKSRWQQGNVFSCSVMHEALHNHYTQKSLSLSPGK

SEQ ID NO: 20672 - protein, 122 aa, Artificial Sequence; identical to SEQ ID NO: 14996
  Description of Artificial Sequence: Synthetic polypeptide
  VH of XENP019019

SEQ ID NO: 20673 - protein, 5 aa, Artificial Sequence
  Description of Artificial Sequence: Synthetic peptide
  XENP019019 vhCDR1
NFWMN

SEQ ID NO: 20674 - protein, 19 aa, Artificial Sequence
  Description of Artificial Sequence: Synthetic peptide
  XENP019019 vhCDR2
EIRLKKNNYATHYAEPVKG

SEQ ID NO: 20675 - protein, 11 aa, Artificial Sequence
  Description of Artificial Sequence: Synthetic peptide
  XENP019019 vhCDR3
YYGNYGGYFDV

SEQ ID NO: 20676 - protein, 214 aa, Artificial Sequence; identical to SEQ ID NO: 16226
  Description of Artificial Sequence: Synthetic polypeptide
  XENP019019 1G6_H1.274_L1_IgG1_PVA_/S267K Light Chain

SEQ ID NO: 20677 - protein, 107 aa, Artificial Sequence; identical to SEQ ID NO: 10923
  Description of Artificial Sequence: Synthetic polypeptide
  VL of XENP019019

SEQ ID NO: 20678 - protein, 11 aa, Artificial Sequence
  Description of Artificial Sequence: Synthetic peptide
  XENP019019 vlCDR1
RASQSVSNDVA

SEQ ID NO: 20679 - protein, 7 aa, Artificial Sequence
  Description of Artificial Sequence: Synthetic peptide
  XENP019019 vlCDR2
YASHRYT

SEQ ID NO: 20680 - protein, 9 aa, Artificial Sequence
  Description of Artificial Sequence: Synthetic peptide
  XENP019019 vlCDR3
QQDYSSPRT

SEQ ID NO: 20681 - protein, 451 aa, Artificial Sequence
  Description of Artificial Sequence: Synthetic polypeptide
  XENP019020 1G6_H1.275_L1_IgG1_PVA_/S267K Heavy Chain
EVQLVESGGGLVKPGGSLRLSCAASGFTFSNFWMNWVRQAPGKGLEWVGEIRWYSNNYATHYAEPVKGRFTISRDDSKSTLYLQMNSLKTEDTAVYYCTRYYGNYGGYFDVWGAGTLVTVSSASTKGPSVFPLAPSSKSTSGGTAALGCLVKDYFPEPVTVSWNSGALTSGVHTFPAVLQSSGLYSLSSVVTVPSSSLGTQTYICNVNHKPSNTKVDKKVEPKSCDKTHTCPPCPAPPVAGPSVFLFPPKPKDTLMISRTPEVTCVVVDVKHEDPEVKFNWYVDGVEVHNAKTKPREEQYNSTYRVVSVLTVLHQDWLNGKEYKCKVSNKALPAPIEKTISKAKGQPREPQVYTLPPSREEMTKNQVSLTCLVKGFYPSDIAVEWESNGQPENNYKTTPPVLDSDGSFFLYSKLTVDKSRWQQGNVFSCSVMHEALHNHYTQKSLSLSPGK

SEQ ID NO: 20682 - protein, 122 aa, Artificial Sequence; identical to SEQ ID NO: 15005
  Description of Artificial Sequence: Synthetic polypeptide
  VH of XENP019020

SEQ ID NO: 20683 - protein, 5 aa, Artificial Sequence
  Description of Artificial Sequence: Synthetic peptide
  XENP019020 vhCDR1
NFWMN

SEQ ID NO: 20684 - protein, 19 aa, Artificial Sequence
  Description of Artificial Sequence: Synthetic peptide
  XENP019020 vhCDR2
EIRWYSNNYATHYAEPVKG

SEQ ID NO: 20685 - protein, 11 aa, Artificial Sequence
  Description of Artificial Sequence: Synthetic peptide
  XENP019020 vhCDR3
YYGNYGGYFDV

SEQ ID NO: 20686 - protein, 214 aa, Artificial Sequence; identical to SEQ ID NO: 16226
  Description of Artificial Sequence: Synthetic polypeptide
  XENP019020 1G6_H1.275_L1_IgG1_PVA_/S267K Light Chain

SEQ ID NO: 20687 - protein, 107 aa, Artificial Sequence; identical to SEQ ID NO: 10923
  Description of Artificial Sequence: Synthetic polypeptide
  VL of XENP019020

SEQ ID NO: 20688 - protein, 11 aa, Artificial Sequence
  Description of Artificial Sequence: Synthetic peptide
  XENP019020 vlCDR1
RASQSVSNDVA

SEQ ID NO: 20689 - protein, 7 aa, Artificial Sequence
  Description of Artificial Sequence: Synthetic peptide
  XENP019020 vlCDR2
YASHRYT

SEQ ID NO: 20690 - protein, 9 aa, Artificial Sequence
  Description of Artificial Sequence: Synthetic peptide
  XENP019020 vlCDR3
QQDYSSPRT

SEQ ID NO: 20691 - protein, 451 aa, Artificial Sequence
  Description of Artificial Sequence: Synthetic polypeptide
  XENP019021 1G6_H1.276_L1_IgG1_PVA_/S267K Heavy Chain
EVQLVESGGGLVQPGGSLKLSCAASGFTFSNYWMNWVRQAPGKGLEWVGEIRLKSNNYATHYAASVKGRFTISRDDSKSTLYLQMNSLKTEDTAVYYCTRYYGNYGGYFDVWGQGTLVTVSSASTKGPSVFPLAPSSKSTSGGTAALGCLVKDYFPEPVTVSWNSGALTSGVHTFPAVLQSSGLYSLSSVVTVPSSSLGTQTYICNVNHKPSNTKVDKKVEPKSCDKTHTCPPCPAPPVAGPSVFLFPPKPKDTLMISRTPEVTCVVVDVKHEDPEVKFNWYVDGVEVHNAKTKPREEQYNSTYRVVSVLTVLHQDWLNGKEYKCKVSNKALPAPIEKTISKAKGQPREPQVYTLPPSREEMTKNQVSLTCLVKGFYPSDIAVEWESNGQPENNYKTTPPVLDSDGSFFLYSKLTVDKSRWQQGNVFSCSVMHEALHNHYTQKSLSLSPGK

SEQ ID NO: 20692 - protein, 122 aa, Artificial Sequence; identical to SEQ ID NO: 15014
  Description of Artificial Sequence: Synthetic polypeptide
  VH of XENP019021

SEQ ID NO: 20693 - protein, 5 aa, Artificial Sequence
  Description of Artificial Sequence: Synthetic peptide
  XENP019021 vhCDR1
NYWMN

SEQ ID NO: 20694 - protein, 19 aa, Artificial Sequence
  Description of Artificial Sequence: Synthetic peptide
  XENP019021 vhCDR2
EIRLKSNNYATHYAASVKG

SEQ ID NO: 20695 - protein, 11 aa, Artificial Sequence
  Description of Artificial Sequence: Synthetic peptide
  XENP019021 vhCDR3
YYGNYGGYFDV

SEQ ID NO: 20696 - protein, 214 aa, Artificial Sequence; identical to SEQ ID NO: 16226
  Description of Artificial Sequence: Synthetic polypeptide
  XENP019021 1G6_H1.276_L1_IgG1_PVA_/S267K Light Chain

SEQ ID NO: 20697 - protein, 107 aa, Artificial Sequence; identical to SEQ ID NO: 10923
  Description of Artificial Sequence: Synthetic polypeptide
  VL of XENP019021

SEQ ID NO: 20698 - protein, 11 aa, Artificial Sequence
  Description of Artificial Sequence: Synthetic peptide
  XENP019021 vlCDR1
RASQSVSNDVA

SEQ ID NO: 20699 - protein, 7 aa, Artificial Sequence
  Description of Artificial Sequence: Synthetic peptide
  XENP019021 vlCDR2
YASHRYT

SEQ ID NO: 20700 - protein, 9 aa, Artificial Sequence
  Description of Artificial Sequence: Synthetic peptide
  XENP019021 vlCDR3
QQDYSSPRT

SEQ ID NO: 20701 - protein, 451 aa, Artificial Sequence
  Description of Artificial Sequence: Synthetic polypeptide
  XENP019022 1G6_H1.277_L1_IgG1_PVA_/S267K Heavy Chain
EVQLVESGGGLVKPGGSLKLSCAASGFTFSNYWMNWVRQAPGKGLEWVGEIRLKSNNYATHYADSVKGRFTISRDDSKSTLYLQMNSLKTEDTAVYYCTRYYGNYGGYFDVWGQGTLVTVSSASTKGPSVFPLAPSSKSTSGGTAALGCLVKDYFPEPVTVSWNSGALTSGVHTFPAVLQSSGLYSLSSVVTVPSSSLGTQTYICNVNHKPSNTKVDKKVEPKSCDKTHTCPPCPAPPVAGPSVFLFPPKPKDTLMISRTPEVTCVVVDVKHEDPEVKFNWYVDGVEVHNAKTKPREEQYNSTYRVVSVLTVLHQDWLNGKEYKCKVSNKALPAPIEKTISKAKGQPREPQVYTLPPSREEMTKNQVSLTCLVKGFYPSDIAVEWESNGQPENNYKTTPPVLDSDGSFFLYSKLTVDKSRWQQGNVFSCSVMHEALHNHYTQKSLSLSPGK

SEQ ID NO: 20702 - protein, 122 aa, Artificial Sequence; identical to SEQ ID NO: 15023
  Description of Artificial Sequence: Synthetic polypeptide
  VH of XENP019022

SEQ ID NO: 20703 - protein, 5 aa, Artificial Sequence
  Description of Artificial Sequence: Synthetic peptide
  XENP019022 vhCDR1
NYWMN

SEQ ID NO: 20704 - protein, 19 aa, Artificial Sequence
  Description of Artificial Sequence: Synthetic peptide
  XENP019022 vhCDR2
EIRLKSNNYATHYADSVKG

SEQ ID NO: 20705 - protein, 11 aa, Artificial Sequence
  Description of Artificial Sequence: Synthetic peptide
  XENP019022 vhCDR3
YYGNYGGYFDV

SEQ ID NO: 20706 - protein, 214 aa, Artificial Sequence; identical to SEQ ID NO: 16226
  Description of Artificial Sequence: Synthetic polypeptide
  XENP019022 1G6_H1.277_L1_IgG1_PVA_/S267K Light Chain

SEQ ID NO: 20707 - protein, 107 aa, Artificial Sequence; identical to SEQ ID NO: 10923
  Description of Artificial Sequence: Synthetic polypeptide
  VL of XENP019022

SEQ ID NO: 20708 - protein, 11 aa, Artificial Sequence
  Description of Artificial Sequence: Synthetic peptide
  XENP019022 vlCDR1
RASQSVSNDVA

SEQ ID NO: 20709 - protein, 7 aa, Artificial Sequence
  Description of Artificial Sequence: Synthetic peptide
  XENP019022 vlCDR2
YASHRYT

SEQ ID NO: 20710 - protein, 9 aa, Artificial Sequence
  Description of Artificial Sequence: Synthetic peptide
  XENP019022 vlCDR3
QQDYSSPRT

SEQ ID NO: 20711 - protein, 451 aa, Artificial Sequence; identical to SEQ ID NO: 16221
  Description of Artificial Sequence: Synthetic polypeptide
  XENP019023 1G6_H1_L1.146_IgG1_PVA_/S267K Heavy Chain

SEQ ID NO: 20712 - protein, 122 aa, Artificial Sequence; identical to SEQ ID NO: 10922
  Description of Artificial Sequence: Synthetic polypeptide
  VH of XENP019023

SEQ ID NO: 20713 - protein, 5 aa, Artificial Sequence
  Description of Artificial Sequence: Synthetic peptide
  XENP019023 vhCDR1
NYWMN

SEQ ID NO: 20714 - protein, 19 aa, Artificial Sequence
  Description of Artificial Sequence: Synthetic peptide
  XENP019023 vhCDR2
EIRLKSNNYATHYAEPVKG

SEQ ID NO: 20715 - protein, 11 aa, Artificial Sequence
  Description of Artificial Sequence: Synthetic peptide
  XENP019023 vhCDR3
YYGNYGGYFDV

SEQ ID NO: 20716 - protein, 214 aa, Artificial Sequence
  Description of Artificial Sequence: Synthetic polypeptide
  XENP019023 1G6_H1_L1.146_IgG1_PVA_/S267K Light Chain
SIVMTQSPATLAVSPGERATLSCRASQSVSNDVAWYQQKPGQSPRLLINYASHRYTGVPDRFTGSGYGTEFTLTISSLQSEDFAVYFCQQDYSSPRTFGGGTKVEIKRTVAAPSVFIFPPSDEQLKSGTASVVCLLNNFYPREAKVQWKVDNALQSGNSQESVTEQDSKDSTYSLSSTLTLSKADYEKHKVYACEVTHQGLSSPVTKSFNRGEC

SEQ ID NO: 20717 - protein, 107 aa, Artificial Sequence; identical to SEQ ID NO: 15033
  Description of Artificial Sequence: Synthetic polypeptide
  VL of XENP019023

SEQ ID NO: 20718 - protein, 11 aa, Artificial Sequence
  Description of Artificial Sequence: Synthetic peptide
  XENP019023 vlCDR1
RASQSVSNDVA

SEQ ID NO: 20719 - protein, 7 aa, Artificial Sequence
  Description of Artificial Sequence: Synthetic peptide
  XENP019023 vlCDR2
YASHRYT

SEQ ID NO: 20720 - protein, 9 aa, Artificial Sequence
  Description of Artificial Sequence: Synthetic peptide
  XENP019023 vlCDR3
QQDYSSPRT

SEQ ID NO: 20721 - protein, 451 aa, Artificial Sequence; identical to SEQ ID NO: 16221
  Description of Artificial Sequence: Synthetic polypeptide
  XENP019024 1G6_H1_L1.147_IgG1_PVA_/S267K Heavy Chain

SEQ ID NO: 20722 - protein, 122 aa, Artificial Sequence; identical to SEQ ID NO: 10922
  Description of Artificial Sequence: Synthetic polypeptide
  VH of XENP019024

SEQ ID NO: 20723 - protein, 5 aa, Artificial Sequence
  Description of Artificial Sequence: Synthetic peptide
  XENP019024 vhCDR1
NYWMN

SEQ ID NO: 20724 - protein, 19 aa, Artificial Sequence
  Description of Artificial Sequence: Synthetic peptide
  XENP019024 vhCDR2
EIRLKSNNYATHYAEPVKG

SEQ ID NO: 20725 - protein, 11 aa, Artificial Sequence
  Description of Artificial Sequence: Synthetic peptide
  XENP019024 vhCDR3
YYGNYGGYFDV

SEQ ID NO: 20726 - protein, 214 aa, Artificial Sequence
  Description of Artificial Sequence: Synthetic polypeptide
  XENP019024 1G6_H1_L1.147_IgG1_PVA_/S267K Light Chain
SIVMTQSPATLPVSPGERATLSCRASQSVSNDVAWYQQKPGQSPRLLINYASHRYTGVPDRFTGSGYGTEFTLTISSLQSEDFAVYFCQQDYSSPRTFGGGTKVEIKRTVAAPSVFIFPPSDEQLKSGTASVVCLLNNFYPREAKVQWKVDNALQSGNSQESVTEQDSKDSTYSLSSTLTLSKADYEKHKVYACEVTHQGLSSPVTKSFNRGEC

SEQ ID NO: 20727 - protein, 107 aa, Artificial Sequence; identical to SEQ ID NO: 15042
  Description of Artificial Sequence: Synthetic polypeptide
  VL of XENP019024

SEQ ID NO: 20728 - protein, 11 aa, Artificial Sequence
  Description of Artificial Sequence: Synthetic peptide
  XENP019024 vlCDR1
RASQSVSNDVA

SEQ ID NO: 20729 - protein, 7 aa, Artificial Sequence
  Description of Artificial Sequence: Synthetic peptide
  XENP019024 vlCDR2
YASHRYT

SEQ ID NO: 20730 - protein, 9 aa, Artificial Sequence
  Description of Artificial Sequence: Synthetic peptide
  XENP019024 vlCDR3
QQDYSSPRT

SEQ ID NO: 20731 - protein, 451 aa, Artificial Sequence; identical to SEQ ID NO: 16221
  Description of Artificial Sequence: Synthetic polypeptide
  XENP019025 1G6_H1_L1.148_IgG1_PVA_/S267K Heavy Chain

SEQ ID NO: 20732 - protein, 122 aa, Artificial Sequence; identical to SEQ ID NO: 10922
  Description of Artificial Sequence: Synthetic polypeptide
  VH of XENP019025

SEQ ID NO: 20733 - protein, 5 aa, Artificial Sequence
  Description of Artificial Sequence: Synthetic peptide
  XENP019025 vhCDR1
NYWMN

SEQ ID NO: 20734 - protein, 19 aa, Artificial Sequence
  Description of Artificial Sequence: Synthetic peptide
  XENP019025 vhCDR2
EIRLKSNNYATHYAEPVKG

SEQ ID NO: 20735 - protein, 11 aa, Artificial Sequence
  Description of Artificial Sequence: Synthetic peptide
  XENP019025 vhCDR3
YYGNYGGYFDV

SEQ ID NO: 20736 - protein, 214 aa, Artificial Sequence
  Description of Artificial Sequence: Synthetic polypeptide
  XENP019025 1G6_H1_L1.148_IgG1_PVA_/S267K Light Chain
SIVMTQSPATLSASPGERATLSCRASQSVSNDVAWYQQKPGQSPRLLINYASHRYTGVPDRFTGSGYGTEFTLTISSLQSEDFAVYFCQQDYSSPRTFGGGTKVEIKRTVAAPSVFIFPPSDEQLKSGTASVVCLLNNFYPREAKVQWKVDNALQSGNSQESVTEQDSKDSTYSLSSTLTLSKADYEKHKVYACEVTHQGLSSPVTKSFNRGEC

SEQ ID NO: 20737 - protein, 107 aa, Artificial Sequence; identical to SEQ ID NO: 15051
  Description of Artificial Sequence: Synthetic polypeptide
  VL of XENP019025

SEQ ID NO: 20738 - protein, 11 aa, Artificial Sequence
  Description of Artificial Sequence: Synthetic peptide
  XENP019025 vlCDR1
RASQSVSNDVA

SEQ ID NO: 20739 - protein, 7 aa, Artificial Sequence
  Description of Artificial Sequence: Synthetic peptide
  XENP019025 vlCDR2
YASHRYT

SEQ ID NO: 20740 - protein, 9 aa, Artificial Sequence
  Description of Artificial Sequence: Synthetic peptide
  XENP019025 vlCDR3
QQDYSSPRT

SEQ ID NO: 20741 - protein, 451 aa, Artificial Sequence; identical to SEQ ID NO: 16221
  Description of Artificial Sequence: Synthetic polypeptide
  XENP019026 1G6_H1_L1.149_IgG1_PVA_/S267K Heavy Chain

SEQ ID NO: 20742 - protein, 122 aa, Artificial Sequence; identical to SEQ ID NO: 10922
  Description of Artificial Sequence: Synthetic polypeptide
  VH of XENP019026

SEQ ID NO: 20743 - protein, 5 aa, Artificial Sequence
  Description of Artificial Sequence: Synthetic peptide
  XENP019026 vhCDR1
NYWMN

SEQ ID NO: 20744 - protein, 19 aa, Artificial Sequence
  Description of Artificial Sequence: Synthetic peptide
  XENP019026 vhCDR2
EIRLKSNNYATHYAEPVKG

SEQ ID NO: 20745 - protein, 11 aa, Artificial Sequence
  Description of Artificial Sequence: Synthetic peptide
  XENP019026 vhCDR3
YYGNYGGYFDV

SEQ ID NO: 20746 - protein, 214 aa, Artificial Sequence
  Description of Artificial Sequence: Synthetic polypeptide
  XENP019026 1G6_H1_L1.149_IgG1_PVA_/S267K Light Chain
SIVMTQSPATLSVSPGERASLSCRASQSVSNDVAWYQQKPGQSPRLLINYASHRYTGVPDRFTGSGYGTEFTLTISSLQSEDFAVYFCQQDYSSPRTFGGGTKVEIKRTVAAPSVFIFPPSDEQLKSGTASVVCLLNNFYPREAKVQWKVDNALQSGNSQESVTEQDSKDSTYSLSSTLTLSKADYEKHKVYACEVTHQGLSSPVTKSFNRGEC

SEQ ID NO: 20747 - protein, 107 aa, Artificial Sequence; identical to SEQ ID NO: 15060
  Description of Artificial Sequence: Synthetic polypeptide
  VL of XENP019026

SEQ ID NO: 20748 - protein, 11 aa, Artificial Sequence
  Description of Artificial Sequence: Synthetic peptide
  XENP019026 vlCDR1
RASQSVSNDVA

SEQ ID NO: 20749 - protein, 7 aa, Artificial Sequence
  Description of Artificial Sequence: Synthetic peptide
  XENP019026 vlCDR2
YASHRYT

SEQ ID NO: 20750 - protein, 9 aa, Artificial Sequence
  Description of Artificial Sequence: Synthetic peptide
  XENP019026 vlCDR3
QQDYSSPRT

SEQ ID NO: 20751 - protein, 451 aa, Artificial Sequence; identical to SEQ ID NO: 16221
  Description of Artificial Sequence: Synthetic polypeptide
  XENP019027 1G6_H1_L1.150_IgG1_PVA_/S267K Heavy Chain

SEQ ID NO: 20752 - protein, 122 aa, Artificial Sequence; identical to SEQ ID NO: 10922
  Description of Artificial Sequence: Synthetic polypeptide
  VH of XENP019027

SEQ ID NO: 20753 - protein, 5 aa, Artificial Sequence
  Description of Artificial Sequence: Synthetic peptide
  XENP019027 vhCDR1
NYWMN

SEQ ID NO: 20754 - protein, 19 aa, Artificial Sequence
  Description of Artificial Sequence: Synthetic peptide
  XENP019027 vhCDR2
EIRLKSNNYATHYAEPVKG

SEQ ID NO: 20755 - protein, 11 aa, Artificial Sequence
  Description of Artificial Sequence: Synthetic peptide
  XENP019027 vhCDR3
YYGNYGGYFDV

SEQ ID NO: 20756 - protein, 214 aa, Artificial Sequence
  Description of Artificial Sequence: Synthetic polypeptide
  XENP019027 1G6_H1_L1.150_IgG1_PVA_/S267K Light Chain
SIVMTQSPATLSVSPGERATLKCRASQSVSNDVAWYQQKPGQSPRLLINYASHRYTGVPDRFTGSGYGTEFTLTISSLQSEDFAVYFCQQDYSSPRTFGGGTKVEIKRTVAAPSVFIFPPSDEQLKSGTASVVCLLNNFYPREAKVQWKVDNALQSGNSQESVTEQDSKDSTYSLSSTLTLSKADYEKHKVYACEVTHQGLSSPVTKSFNRGEC

SEQ ID NO: 20757 - protein, 107 aa, Artificial Sequence; identical to SEQ ID NO: 15069
  Description of Artificial Sequence: Synthetic polypeptide
  VL of XENP019027

SEQ ID NO: 20758 - protein, 11 aa, Artificial Sequence
  Description of Artificial Sequence: Synthetic peptide
  XENP019027 vlCDR1
RASQSVSNDVA

SEQ ID NO: 20759 - protein, 7 aa, Artificial Sequence
  Description of Artificial Sequence: Synthetic peptide
  XENP019027 vlCDR2
YASHRYT

SEQ ID NO: 20760 - protein, 9 aa, Artificial Sequence
  Description of Artificial Sequence: Synthetic peptide
  XENP019027 vlCDR3
QQDYSSPRT

SEQ ID NO: 20761 - protein, 451 aa, Artificial Sequence; identical to SEQ ID NO: 16221
  Description of Artificial Sequence: Synthetic polypeptide
  XENP019028 1G6_H1_L1.151_IgG1_PVA_/S267K Heavy Chain

SEQ ID NO: 20762 - protein, 122 aa, Artificial Sequence; identical to SEQ ID NO: 10922
  Description of Artificial Sequence: Synthetic polypeptide
  VH of XENP019028

SEQ ID NO: 20763 - protein, 5 aa, Artificial Sequence
  Description of Artificial Sequence: Synthetic peptide
  XENP019028 vhCDR1
NYWMN

SEQ ID NO: 20764 - protein, 19 aa, Artificial Sequence
  Description of Artificial Sequence: Synthetic peptide
  XENP019028 vhCDR2
EIRLKSNNYATHYAEPVKG

SEQ ID NO: 20765 - protein, 11 aa, Artificial Sequence
  Description of Artificial Sequence: Synthetic peptide
  XENP019028 vhCDR3
YYGNYGGYFDV

SEQ ID NO: 20766 - protein, 214 aa, Artificial Sequence
  Description of Artificial Sequence: Synthetic polypeptide
  XENP019028 1G6_H1_L1.151_IgG1_PVA_/S267K Light Chain
SIVMTQSPATLSVSPGERATLSCRASQSVSNDVAWYQQKPEQSPRLLINYASHRYTGVPDRFTGSGYGTEFTLTISSLQSEDFAVYFCQQDYSSPRTFGGGTKVEIKRTVAAPSVFIFPPSDEQLKSGTASVVCLLNNFYPREAKVQWKVDNALQSGNSQESVTEQDSKDSTYSLSSTLTLSKADYEKHKVYACEVTHQGLSSPVTKSFNRGEC

SEQ ID NO: 20767 - protein, 107 aa, Artificial Sequence; identical to SEQ ID NO: 15078
  Description of Artificial Sequence: Synthetic polypeptide
  VL of XENP019028

SEQ ID NO: 20768 - protein, 11 aa, Artificial Sequence
  Description of Artificial Sequence: Synthetic peptide
  XENP019028 vlCDR1
RASQSVSNDVA

SEQ ID NO: 20769 - protein, 7 aa, Artificial Sequence
  Description of Artificial Sequence: Synthetic peptide
  XENP019028 vlCDR2
YASHRYT

SEQ ID NO: 20770 - protein, 9 aa, Artificial Sequence
  Description of Artificial Sequence: Synthetic peptide
  XENP019028 vlCDR3
QQDYSSPRT

SEQ ID NO: 20771 - protein, 451 aa, Artificial Sequence; identical to SEQ ID NO: 16221
  Description of Artificial Sequence: Synthetic polypeptide
  XENP019029 1G6_H1_L1.152_IgG1_PVA_/S267K Heavy Chain

SEQ ID NO: 20772 - protein, 122 aa, Artificial Sequence; identical to SEQ ID NO: 10922
  Description of Artificial Sequence: Synthetic polypeptide
  VH of XENP019029

SEQ ID NO: 20773 - protein, 5 aa, Artificial Sequence
  Description of Artificial Sequence: Synthetic peptide
  XENP019029 vhCDR1
NYWMN

SEQ ID NO: 20774 - protein, 19 aa, Artificial Sequence
  Description of Artificial Sequence: Synthetic peptide
  XENP019029 vhCDR2
EIRLKSNNYATHYAEPVKG

SEQ ID NO: 20775 - protein, 11 aa, Artificial Sequence
  Description of Artificial Sequence: Synthetic peptide
  XENP019029 vhCDR3
YYGNYGGYFDV

SEQ ID NO: 20776 - protein, 214 aa, Artificial Sequence
  Description of Artificial Sequence: Synthetic polypeptide
  XENP019029 1G6_H1_L1.152_IgG1_PVA_/S267K Light Chain
SIVMTQSPATLSVSPGERATLSCRASQSVSNDVAWYQQKPGESPRLLINYASHRYTGVPDRFTGSGYGTEFTLTISSLQSEDFAVYFCQQDYSSPRTFGGGTKVEIKRTVAAPSVFIFPPSDEQLKSGTASVVCLLNNFYPREAKVQWKVDNALQSGNSQESVTEQDSKDSTYSLSSTLTLSKADYEKHKVYACEVTHQGLSSPVTKSFNRGEC

SEQ ID NO: 20777 - protein, 107 aa, Artificial Sequence; identical to SEQ ID NO: 15087
  Description of Artificial Sequence: Synthetic polypeptide
  VL of XENP019029

SEQ ID NO: 20778 - protein, 11 aa, Artificial Sequence
  Description of Artificial Sequence: Synthetic peptide
  XENP019029 vlCDR1
RASQSVSNDVA

SEQ ID NO: 20779 - protein, 7 aa, Artificial Sequence
  Description of Artificial Sequence: Synthetic peptide
  XENP019029 vlCDR2
YASHRYT

SEQ ID NO: 20780 - protein, 9 aa, Artificial Sequence
  Description of Artificial Sequence: Synthetic peptide
  XENP019029 vlCDR3
QQDYSSPRT

SEQ ID NO: 20781 - protein, 451 aa, Artificial Sequence; identical to SEQ ID NO: 16221
  Description of Artificial Sequence: Synthetic polypeptide
  XENP019030 1G6_H1_L1.153_IgG1_PVA_/S267K Heavy Chain

SEQ ID NO: 20782 - protein, 122 aa, Artificial Sequence; identical to SEQ ID NO: 10922
  Description of Artificial Sequence: Synthetic polypeptide
  VH of XENP019030

SEQ ID NO: 20783 - protein, 5 aa, Artificial Sequence
  Description of Artificial Sequence: Synthetic peptide
  XENP019030 vhCDR1
NYWMN

SEQ ID NO: 20784 - protein, 19 aa, Artificial Sequence
  Description of Artificial Sequence: Synthetic peptide
  XENP019030 vhCDR2
EIRLKSNNYATHYAEPVKG

SEQ ID NO: 20785 - protein, 11 aa, Artificial Sequence
  Description of Artificial Sequence: Synthetic peptide
  XENP019030 vhCDR3
YYGNYGGYFDV

SEQ ID NO: 20786 - protein, 214 aa, Artificial Sequence
  Description of Artificial Sequence: Synthetic polypeptide
  XENP019030 1G6_H1_L1.153_IgG1_PVA_/S267K Light Chain
SIVMTQSPATLSVSPGERATLSCRASQSVSNDVAWYQQKPGQSPRVLINYASHRYTGVPDRFTGSGYGTEFTLTISSLQSEDFAVYFCQQDYSSPRTFGGGTKVEIKRTVAAPSVFIFPPSDEQLKSGTASVVCLLNNFYPREAKVQWKVDNALQSGNSQESVTEQDSKDSTYSLSSTLTLSKADYEKHKVYACEVTHQGLSSPVTKSFNRGEC

SEQ ID NO: 20787 - protein, 107 aa, Artificial Sequence; identical to SEQ ID NO: 15096
  Description of Artificial Sequence: Synthetic polypeptide
  VL of XENP019030

SEQ ID NO: 20788 - protein, 11 aa, Artificial Sequence
  Description of Artificial Sequence: Synthetic peptide
  XENP019030 vlCDR1
RASQSVSNDVA

SEQ ID NO: 20789 - protein, 7 aa, Artificial Sequence
  Description of Artificial Sequence: Synthetic peptide
  XENP019030 vlCDR2
YASHRYT

SEQ ID NO: 20790 - protein, 9 aa, Artificial Sequence
  Description of Artificial Sequence: Synthetic peptide
  XENP019030 vlCDR3
QQDYSSPRT

SEQ ID NO: 20791 - protein, 451 aa, Artificial Sequence; identical to SEQ ID NO: 16221
  Description of Artificial Sequence: Synthetic polypeptide
  XENP019031 1G6_H1_L1.154_IgG1_PVA_/S267K Heavy Chain

SEQ ID NO: 20792 - protein, 122 aa, Artificial Sequence; identical to SEQ ID NO: 10922
  Description of Artificial Sequence: Synthetic polypeptide
  VH of XENP019031

SEQ ID NO: 20793 - protein, 5 aa, Artificial Sequence
  Description of Artificial Sequence: Synthetic peptide
  XENP019031 vhCDR1
NYWMN

SEQ ID NO: 20794 - protein, 19 aa, Artificial Sequence
  Description of Artificial Sequence: Synthetic peptide
  XENP019031 vhCDR2
EIRLKSNNYATHYAEPVKG

SEQ ID NO: 20795 - protein, 11 aa, Artificial Sequence
  Description of Artificial Sequence: Synthetic peptide
  XENP019031 vhCDR3
YYGNYGGYFDV

SEQ ID NO: 20796 - protein, 214 aa, Artificial Sequence
  Description of Artificial Sequence: Synthetic polypeptide
  XENP019031 1G6_H1_L1.154_IgG1_PVA_/S267K Light Chain
SIVMTQSPATLSVSPGERATLSCRASQSVSNDVAWYQQKPGQSPRLLVNYASHRYTGVPDRFTGSGYGTEFTLTISSLQSEDFAVYFCQQDYSSPRTFGGGTKVEIKRTVAAPSVFIFPPSDEQLKSGTASVVCLLNNFYPREAKVQWKVDNALQSGNSQESVTEQDSKDSTYSLSSTLTLSKADYEKHKVYACEVTHQGLSSPVTKSFNRGEC

SEQ ID NO: 20797 - protein, 107 aa, Artificial Sequence; identical to SEQ ID NO: 15105
  Description of Artificial Sequence: Synthetic polypeptide
  VL of XENP019031

SEQ ID NO: 20798 - protein, 11 aa, Artificial Sequence
  Description of Artificial Sequence: Synthetic peptide
  XENP019031 vlCDR1
RASQSVSNDVA

SEQ ID NO: 20799 - protein, 7 aa, Artificial Sequence
  Description of Artificial Sequence: Synthetic peptide
  XENP019031 vlCDR2
YASHRYT

SEQ ID NO: 20800 - protein, 9 aa, Artificial Sequence
  Description of Artificial Sequence: Synthetic peptide
  XENP019031 vlCDR3
QQDYSSPRT

SEQ ID NO: 20801 - protein, 451 aa, Artificial Sequence; identical to SEQ ID NO: 16221
  Description of Artificial Sequence: Synthetic polypeptide
  XENP019032 1G6_H1_L1.155_IgG1_PVA_/S267K Heavy Chain

SEQ ID NO: 20802 - protein, 122 aa, Artificial Sequence; identical to SEQ ID NO: 10922
  Description of Artificial Sequence: Synthetic polypeptide
  VH of XENP019032

SEQ ID NO: 20803 - protein, 5 aa, Artificial Sequence
  Description of Artificial Sequence: Synthetic peptide
  XENP019032 vhCDR1
NYWMN

SEQ ID NO: 20804 - protein, 19 aa, Artificial Sequence
  Description of Artificial Sequence: Synthetic peptide
  XENP019032 vhCDR2
EIRLKSNNYATHYAEPVKG

SEQ ID NO: 20805 - protein, 11 aa, Artificial Sequence
  Description of Artificial Sequence: Synthetic peptide
  XENP019032 vhCDR3
YYGNYGGYFDV

SEQ ID NO: 20806 - protein, 214 aa, Artificial Sequence
  Description of Artificial Sequence: Synthetic polypeptide
  XENP019032 1G6_H1_L1.155_IgG1_PVA_/S267K Light Chain
SIVMTQSPATLSVSPGERATLSCRASQSVSNDVAWYQQKPGQSPRLLINYANHRYTGVPDRFTGSGYGTEFTLTISSLQSEDFAVYFCQQDYSSPRTFGGGTKVEIKRTVAAPSVFIFPPSDEQLKSGTASVVCLLNNFYPREAKVQWKVDNALQSGNSQESVTEQDSKDSTYSLSSTLTLSKADYEKHKVYACEVTHQGLSSPVTKSFNRGEC

SEQ ID NO: 20807 - protein, 107 aa, Artificial Sequence; identical to SEQ ID NO: 15114
  Description of Artificial Sequence: Synthetic polypeptide
  VL of XENP019032

SEQ ID NO: 20808 - protein, 11 aa, Artificial Sequence
  Description of Artificial Sequence: Synthetic peptide
  XENP019032 vlCDR1
RASQSVSNDVA

SEQ ID NO: 20809 - protein, 7 aa, Artificial Sequence
  Description of Artificial Sequence: Synthetic peptide
  XENP019032 vlCDR2
YANHRYT

SEQ ID NO: 20810 - protein, 9 aa, Artificial Sequence
  Description of Artificial Sequence: Synthetic peptide
  XENP019032 vlCDR3
QQDYSSPRT

SEQ ID NO: 20811 - protein, 451 aa, Artificial Sequence; identical to SEQ ID NO: 16221
  Description of Artificial Sequence: Synthetic polypeptide
  XENP019033 1G6_H1_L1.156_IgG1_PVA_/S267K Heavy Chain

SEQ ID NO: 20812 - protein, 122 aa, Artificial Sequence; identical to SEQ ID NO: 10922
  Description of Artificial Sequence: Synthetic polypeptide
  VH of XENP019033

SEQ ID NO: 20813 - protein, 5 aa, Artificial Sequence
  Description of Artificial Sequence: Synthetic peptide
  XENP019033 vhCDR1
NYWMN

SEQ ID NO: 20814 - protein, 19 aa, Artificial Sequence
  Description of Artificial Sequence: Synthetic peptide
  XENP019033 vhCDR2
EIRLKSNNYATHYAEPVKG

SEQ ID NO: 20815 - protein, 11 aa, Artificial Sequence
  Description of Artificial Sequence: Synthetic peptide
  XENP019033 vhCDR3
YYGNYGGYFDV

SEQ ID NO: 20816 - protein, 214 aa, Artificial Sequence
  Description of Artificial Sequence: Synthetic polypeptide
  XENP019033 1G6_H1_L1.156_IgG1_PVA_/S267K Light Chain
SIVMTQSPATLSVSPGERATLSCRASQSVSNDVAWYQQKPGQSPRLLINYASHRYTGVPDRFTGSGYGTEFTLTISSLESEDFAVYFCQQDYSSPRTFGGGTKVEIKRTVAAPSVFIFPPSDEQLKSGTASVVCLLNNFYPREAKVQWKVDNALQSGNSQESVTEQDSKDSTYSLSSTLTLSKADYEKHKVYACEVTHQGLSSPVTKSFNRGEC

SEQ ID NO: 20817 - protein, 107 aa, Artificial Sequence; identical to SEQ ID NO: 15123
  Description of Artificial Sequence: Synthetic polypeptide
  VL of XENP019033

SEQ ID NO: 20818 - protein, 11 aa, Artificial Sequence
  Description of Artificial Sequence: Synthetic peptide
  XENP019033 vlCDR1
RASQSVSNDVA

SEQ ID NO: 20819 - protein, 7 aa, Artificial Sequence
  Description of Artificial Sequence: Synthetic peptide
  XENP019033 vlCDR2
YASHRYT

SEQ ID NO: 20820 - protein, 9 aa, Artificial Sequence
  Description of Artificial Sequence: Synthetic peptide
  XENP019033 vlCDR3
QQDYSSPRT

SEQ ID NO: 20821 - protein, 451 aa, Artificial Sequence; identical to SEQ ID NO: 16221
  Description of Artificial Sequence: Synthetic polypeptide
  XENP019034 1G6_H1_L1.157_IgG1_PVA_/S267K Heavy Chain

SEQ ID NO: 20822 - protein, 122 aa, Artificial Sequence; identical to SEQ ID NO: 10922
  Description of Artificial Sequence: Synthetic polypeptide
  VH of XENP019034

SEQ ID NO: 20823 - protein, 5 aa, Artificial Sequence
  Description of Artificial Sequence: Synthetic peptide
  XENP019034 vhCDR1
NYWMN

SEQ ID NO: 20824 - protein, 19 aa, Artificial Sequence
  Description of Artificial Sequence: Synthetic peptide
  XENP019034 vhCDR2
EIRLKSNNYATHYAEPVKG

SEQ ID NO: 20825 - protein, 11 aa, Artificial Sequence
  Description of Artificial Sequence: Synthetic peptide
  XENP019034 vhCDR3
YYGNYGGYFDV

SEQ ID NO: 20826 - protein, 214 aa, Artificial Sequence
  Description of Artificial Sequence: Synthetic polypeptide
  XENP019034 1G6_H1_L1.157_IgG1_PVA_/S267K Light Chain
SIVMTQSPATLSVSPGERATLSCRASQSVSNDVAWYQQKPGQSPRLLINYASHRYTGVPDRFTGSGYGTEFTLTISSLKSEDFAVYFCQQDYSSPRTFGGGTKVEIKRTVAAPSVFIFPPSDEQLKSGTASVVCLLNNFYPREAKVQWKVDNALQSGNSQESVTEQDSKDSTYSLSSTLTLSKADYEKHKVYACEVTHQGLSSPVTKSFNRGEC

SEQ ID NO: 20827 - protein, 107 aa, Artificial Sequence; identical to SEQ ID NO: 15132
  Description of Artificial Sequence: Synthetic polypeptide
  VL of XENP019034

SEQ ID NO: 20828 - protein, 11 aa, Artificial Sequence
  Description of Artificial Sequence: Synthetic peptide
  XENP019034 vlCDR1
RASQSVSNDVA

SEQ ID NO: 20829 - protein, 7 aa, Artificial Sequence
  Description of Artificial Sequence: Synthetic peptide
  XENP019034 vlCDR2
YASHRYT

SEQ ID NO: 20830 - protein, 9 aa, Artificial Sequence
  Description of Artificial Sequence: Synthetic peptide
  XENP019034 vlCDR3
QQDYSSPRT

SEQ ID NO: 20831 - protein, 451 aa, Artificial Sequence; identical to SEQ ID NO: 16221
  Description of Artificial Sequence: Synthetic polypeptide
  XENP019035 1G6_H1_L1.158_IgG1_PVA_/S267K Heavy Chain

SEQ ID NO: 20832 - protein, 122 aa, Artificial Sequence; identical to SEQ ID NO: 10922
  Description of Artificial Sequence: Synthetic polypeptide
  VH of XENP019035

SEQ ID NO: 20833 - protein, 5 aa, Artificial Sequence
  Description of Artificial Sequence: Synthetic peptide
  XENP019035 vhCDR1
NYWMN

SEQ ID NO: 20834 - protein, 19 aa, Artificial Sequence
  Description of Artificial Sequence: Synthetic peptide
  XENP019035 vhCDR2
EIRLKSNNYATHYAEPVKG

SEQ ID NO: 20835 - protein, 11 aa, Artificial Sequence
  Description of Artificial Sequence: Synthetic peptide
  XENP019035 vhCDR3
YYGNYGGYFDV

SEQ ID NO: 20836 - protein, 214 aa, Artificial Sequence
  Description of Artificial Sequence: Synthetic polypeptide
  XENP019035 1G6_H1_L1.158_IgG1_PVA_/S267K Light Chain
SIVMTQSPATLSVSPGERATLSCRASQSVSNDVAWYQQKPGQSPRLLINYASHRYTGVPDRFTGSGYGTEFTLTISSLQSEDFGVYFCQQDYSSPRTFGGGTKVEIKRTVAAPSVFIFPPSDEQLKSGTASVVCLLNNFYPREAKVQWKVDNALQSGNSQESVTEQDSKDSTYSLSSTLTLSKADYEKHKVYACEVTHQGLSSPVTKSFNRGEC

SEQ ID NO: 20837 - protein, 107 aa, Artificial Sequence; identical to SEQ ID NO: 15141
  Description of Artificial Sequence: Synthetic polypeptide
  VL of XENP019035

SEQ ID NO: 20838 - protein, 11 aa, Artificial Sequence
  Description of Artificial Sequence: Synthetic peptide
  XENP019035 vlCDR1
RASQSVSNDVA

SEQ ID NO: 20839 - protein, 7 aa, Artificial Sequence
  Description of Artificial Sequence: Synthetic peptide
  XENP019035 vlCDR2
YASHRYT

SEQ ID NO: 20840 - protein, 9 aa, Artificial Sequence
  Description of Artificial Sequence: Synthetic peptide
  XENP019035 vlCDR3
QQDYSSPRT

SEQ ID NO: 20841 - protein, 451 aa, Artificial Sequence; identical to SEQ ID NO: 16221
  Description of Artificial Sequence: Synthetic polypeptide
  XENP019036 1G6_H1_L1.159_IgG1_PVA_/S267K Heavy Chain

SEQ ID NO: 20842 - protein, 122 aa, Artificial Sequence; identical to SEQ ID NO: 10922
  Description of Artificial Sequence: Synthetic polypeptide
  VH of XENP019036

SEQ ID NO: 20843 - protein, 5 aa, Artificial Sequence
  Description of Artificial Sequence: Synthetic peptide
  XENP019036 vhCDR1
NYWMN

SEQ ID NO: 20844 - protein, 19 aa, Artificial Sequence
  Description of Artificial Sequence: Synthetic peptide
  XENP019036 vhCDR2
EIRLKSNNYATHYAEPVKG

SEQ ID NO: 20845 - protein, 11 aa, Artificial Sequence
  Description of Artificial Sequence: Synthetic peptide
  XENP019036 vhCDR3
YYGNYGGYFDV

SEQ ID NO: 20846 - protein, 214 aa, Artificial Sequence
  Description of Artificial Sequence: Synthetic polypeptide
  XENP019036 1G6_H1_L1.159_IgG1_PVA_/S267K Light Chain
SIVMTQSPATLSVSPGERATLSCRASQSVSNDVAWYQQKPGQSPRLLINYASHRYTGVPDRFTGSGYGTEFTLTISSLQSEDFAVYFCKQDYSSPRTFGGGTKVEIKRTVAAPSVFIFPPSDEQLKSGTASVVCLLNNFYPREAKVQWKVDNALQSGNSQESVTEQDSKDSTYSLSSTLTLSKADYEKHKVYACEVTHQGLSSPVTKSFNRGEC

SEQ ID NO: 20847 - protein, 107 aa, Artificial Sequence; identical to SEQ ID NO: 15150
  Description of Artificial Sequence: Synthetic polypeptide
  VL of XENP019036

SEQ ID NO: 20848 - protein, 11 aa, Artificial Sequence
  Description of Artificial Sequence: Synthetic peptide
  XENP019036 vlCDR1
RASQSVSNDVA

SEQ ID NO: 20849 - protein, 7 aa, Artificial Sequence
  Description of Artificial Sequence: Synthetic peptide
  XENP019036 vlCDR2
YASHRYT

SEQ ID NO: 20850 - protein, 9 aa, Artificial Sequence
  Description of Artificial Sequence: Synthetic peptide
  XENP019036 vlCDR3
KQDYSSPRT

SEQ ID NO: 20851 - protein, 451 aa, Artificial Sequence; identical to SEQ ID NO: 16221
  Description of Artificial Sequence: Synthetic polypeptide
  XENP019037 1G6_H1_L1.160_IgG1_PVA_/S267K Heavy Chain

SEQ ID NO: 20852 - protein, 122 aa, Artificial Sequence; identical to SEQ ID NO: 10922
  Description of Artificial Sequence: Synthetic polypeptide
  VH of XENP019037

SEQ ID NO: 20853 - protein, 5 aa, Artificial Sequence
  Description of Artificial Sequence: Synthetic peptide
  XENP019037 vhCDR1
NYWMN

SEQ ID NO: 20854 - protein, 19 aa, Artificial Sequence
  Description of Artificial Sequence: Synthetic peptide
  XENP019037 vhCDR2
EIRLKSNNYATHYAEPVKG

SEQ ID NO: 20855 - protein, 11 aa, Artificial Sequence
  Description of Artificial Sequence: Synthetic peptide
  XENP019037 vhCDR3
YYGNYGGYFDV

SEQ ID NO: 20856 - protein, 214 aa, Artificial Sequence
  Description of Artificial Sequence: Synthetic polypeptide
  XENP019037 1G6_H1_L1.160_IgG1_PVA_/S267K Light Chain
SIVMTQSPATLSVSPGERATLSCRASQSVSNDVAWYQQKPGQSPRLLINYASHRYTGVPDRFTGSGYGTEFTLTISSLQSEDFAVYFCQKDYSSPRTFGGGTKVEIKRTVAAPSVFIFPPSDEQLKSGTASVVCLLNNFYPREAKVQWKVDNALQSGNSQESVTEQDSKDSTYSLSSTLTLSKADYEKHKVYACEVTHQGLSSPVTKSFNRGEC

SEQ ID NO: 20857 - protein, 107 aa, Artificial Sequence; identical to SEQ ID NO: 15159
  Description of Artificial Sequence: Synthetic polypeptide
  VL of XENP019037

SEQ ID NO: 20858 - protein, 11 aa, Artificial Sequence
  Description of Artificial Sequence: Synthetic peptide
  XENP019037 vlCDR1
RASQSVSNDVA

SEQ ID NO: 20859 - protein, 7 aa, Artificial Sequence
  Description of Artificial Sequence: Synthetic peptide
  XENP019037 vlCDR2
YASHRYT

SEQ ID NO: 20860 - protein, 9 aa, Artificial Sequence
  Description of Artificial Sequence: Synthetic peptide
  XENP019037 vlCDR3
QKDYSSPRT

SEQ ID NO: 20861 - protein, 451 aa, Artificial Sequence; identical to SEQ ID NO: 16221
  Description of Artificial Sequence: Synthetic polypeptide
  XENP019038 1G6_H1_L1.161_IgG1_PVA_/S267K Heavy Chain

SEQ ID NO: 20862 - protein, 122 aa, Artificial Sequence; identical to SEQ ID NO: 10922
  Description of Artificial Sequence: Synthetic polypeptide
  VH of XENP019038

SEQ ID NO: 20863 - protein, 5 aa, Artificial Sequence
  Description of Artificial Sequence: Synthetic peptide
  XENP019038 vhCDR1
NYWMN

SEQ ID NO: 20864 - protein, 19 aa, Artificial Sequence
  Description of Artificial Sequence: Synthetic peptide
  XENP019038 vhCDR2
EIRLKSNNYATHYAEPVKG

SEQ ID NO: 20865 - protein, 11 aa, Artificial Sequence
  Description of Artificial Sequence: Synthetic peptide
  XENP019038 vhCDR3
YYGNYGGYFDV

SEQ ID NO: 20866 - protein, 214 aa, Artificial Sequence
  Description of Artificial Sequence: Synthetic polypeptide
  XENP019038 1G6_H1_L1.161_IgG1_PVA_/S267K Light Chain
SIVMTQSPATLSVSPGERATLSCRASQSVSNDVAWYQQKPGQSPRLLINYASHRYTGVPDRFTGSGYGTEFTLTISSLQSEDFAVYFCQNDYSSPRTFGGGTKVEIKRTVAAPSVFIFPPSDEQLKSGTASVVCLLNNFYPREAKVQWKVDNALQSGNSQESVTEQDSKDSTYSLSSTLTLSKADYEKHKVYACEVTHQGLSSPVTKSFNRGEC

SEQ ID NO: 20867 - protein, 107 aa, Artificial Sequence; identical to SEQ ID NO: 15168
  Description of Artificial Sequence: Synthetic polypeptide
  VL of XENP019038

SEQ ID NO: 20868 - protein, 11 aa, Artificial Sequence
  Description of Artificial Sequence: Synthetic peptide
  XENP019038 vlCDR1
RASQSVSNDVA

SEQ ID NO: 20869 - protein, 7 aa, Artificial Sequence
  Description of Artificial Sequence: Synthetic peptide
  XENP019038 vlCDR2
YASHRYT

SEQ ID NO: 20870 - protein, 9 aa, Artificial Sequence
  Description of Artificial Sequence: Synthetic peptide
  XENP019038 vlCDR3
QNDYSSPRT

SEQ ID NO: 20871 - protein, 451 aa, Artificial Sequence; identical to SEQ ID NO: 16221
  Description of Artificial Sequence: Synthetic polypeptide
  XENP019039 1G6_H1_L1.162_IgG1_PVA_/S267K Heavy Chain

SEQ ID NO: 20872 - protein, 122 aa, Artificial Sequence; identical to SEQ ID NO: 10922
  Description of Artificial Sequence: Synthetic polypeptide
  VH of XENP019039

SEQ ID NO: 20873 - protein, 5 aa, Artificial Sequence
  Description of Artificial Sequence: Synthetic peptide
  XENP019039 vhCDR1
NYWMN

SEQ ID NO: 20874 - protein, 19 aa, Artificial Sequence
  Description of Artificial Sequence: Synthetic peptide
  XENP019039 vhCDR2
EIRLKSNNYATHYAEPVKG

SEQ ID NO: 20875 - protein, 11 aa, Artificial Sequence
  Description of Artificial Sequence: Synthetic peptide
  XENP019039 vhCDR3
YYGNYGGYFDV

SEQ ID NO: 20876 - protein, 214 aa, Artificial Sequence
  Description of Artificial Sequence: Synthetic polypeptide
  XENP019039 1G6_H1_L1.162_IgG1_PVA_/S267K Light Chain
SIVMTQSPATLSVSPGERATLSCRASQSVSNDVAWYQQKPGQSPRLLINYASHRYTGVPDRFTGSGYGTEFTLTISSLQSEDFAVYFCQRDYSSPRTFGGGTKVEIKRTVAAPSVFIFPPSDEQLKSGTASVVCLLNNFYPREAKVQWKVDNALQSGNSQESVTEQDSKDSTYSLSSTLTLSKADYEKHKVYACEVTHQGLSSPVTKSFNRGEC

SEQ ID NO: 20877 - protein, 107 aa, Artificial Sequence; identical to SEQ ID NO: 15177
  Description of Artificial Sequence: Synthetic polypeptide
  VL of XENP019039

SEQ ID NO: 20878 - protein, 11 aa, Artificial Sequence
  Description of Artificial Sequence: Synthetic peptide
  XENP019039 vlCDR1
RASQSVSNDVA

SEQ ID NO: 20879 - protein, 7 aa, Artificial Sequence
  Description of Artificial Sequence: Synthetic peptide
  XENP019039 vlCDR2
YASHRYT

SEQ ID NO: 20880 - protein, 9 aa, Artificial Sequence
  Description of Artificial Sequence: Synthetic peptide
  XENP019039 vlCDR3
QRDYSSPRT

SEQ ID NO: 20881 - protein, 451 aa, Artificial Sequence; identical to SEQ ID NO: 16221
  Description of Artificial Sequence: Synthetic polypeptide
  XENP019040 1G6_H1_L1.163_IgG1_PVA_/S267K Heavy Chain

SEQ ID NO: 20882 - protein, 122 aa, Artificial Sequence; identical to SEQ ID NO: 10922
  Description of Artificial Sequence: Synthetic polypeptide
  VH of XENP019040

SEQ ID NO: 20883 - protein, 5 aa, Artificial Sequence
  Description of Artificial Sequence: Synthetic peptide
  XENP019040 vhCDR1
NYWMN

SEQ ID NO: 20884 - protein, 19 aa, Artificial Sequence
  Description of Artificial Sequence: Synthetic peptide
  XENP019040 vhCDR2
EIRLKSNNYATHYAEPVKG

SEQ ID NO: 20885 - protein, 11 aa, Artificial Sequence
  Description of Artificial Sequence: Synthetic peptide
  XENP019040 vhCDR3
YYGNYGGYFDV

SEQ ID NO: 20886 - protein, 214 aa, Artificial Sequence
  Description of Artificial Sequence: Synthetic polypeptide
  XENP019040 1G6_H1_L1.163_IgG1_PVA_/S267K Light Chain
SIVMTQSPATLSVSPGEPATLSCRASQSVSNDVAWYQQKPGQSPRLLINYASHRYTGVPDRFTGSGYGTEFTLTISRLQSEDFAVYFCQQDYSSPRTFGGGTKVEIKRTVAAPSVFIFPPSDEQLKSGTASVVCLLNNFYPREAKVQWKVDNALQSGNSQESVTEQDSKDSTYSLSSTLTLSKADYEKHKVYACEVTHQGLSSPVTKSFNRGEC

SEQ ID NO: 20887 - protein, 107 aa, Artificial Sequence; identical to SEQ ID NO: 15186
  Description of Artificial Sequence: Synthetic polypeptide
  VL of XENP019040

SEQ ID NO: 20888 - protein, 11 aa, Artificial Sequence
  Description of Artificial Sequence: Synthetic peptide
  XENP019040 vlCDR1
RASQSVSNDVA

SEQ ID NO: 20889 - protein, 7 aa, Artificial Sequence
  Description of Artificial Sequence: Synthetic peptide
  XENP019040 vlCDR2
YASHRYT

SEQ ID NO: 20890 - protein, 9 aa, Artificial Sequence
  Description of Artificial Sequence: Synthetic peptide
  XENP019040 vlCDR3
QQDYSSPRT

SEQ ID NO: 20891 - protein, 451 aa, Artificial Sequence; identical to SEQ ID NO: 16221
  Description of Artificial Sequence: Synthetic polypeptide
  XENP019041 1G6_H1_L1.164_IgG1_PVA_/S267K Heavy Chain

SEQ ID NO: 20892 - protein, 122 aa, Artificial Sequence; identical to SEQ ID NO: 10922
  Description of Artificial Sequence: Synthetic polypeptide
  VH of XENP019041

SEQ ID NO: 20893 - protein, 5 aa, Artificial Sequence
  Description of Artificial Sequence: Synthetic peptide
  XENP019041 vhCDR1
NYWMN

SEQ ID NO: 20894 - protein, 19 aa, Artificial Sequence
  Description of Artificial Sequence: Synthetic peptide
  XENP019041 vhCDR2
EIRLKSNNYATHYAEPVKG

SEQ ID NO: 20895 - protein, 11 aa, Artificial Sequence
  Description of Artificial Sequence: Synthetic peptide
  XENP019041 vhCDR3
YYGNYGGYFDV

SEQ ID NO: 20896 - protein, 214 aa, Artificial Sequence
  Description of Artificial Sequence: Synthetic polypeptide
  XENP019041 1G6_H1_L1.164_IgG1_PVA_/S267K Light Chain
SIVMTQSPATLSVSPGERATLSCRASESVSNDVAWYQQKPGQSPRLLINYASHRYTGVPDRFTGSGYGTEFTLTISSLQSEDFAVYFCQKDYSSPRTFGGGTKVEIKRTVAAPSVFIFPPSDEQLKSGTASVVCLLNNFYPREAKVQWKVDNALQSGNSQESVTEQDSKDSTYSLSSTLTLSKADYEKHKVYACEVTHQGLSSPVTKSFNRGEC

SEQ ID NO: 20897 - protein, 107 aa, Artificial Sequence; identical to SEQ ID NO: 15195
  Description of Artificial Sequence: Synthetic polypeptide
  VL of XENP019041

SEQ ID NO: 20898 - protein, 11 aa, Artificial Sequence
  Description of Artificial Sequence: Synthetic peptide
  XENP019041 vlCDR1
RASESVSNDVA

SEQ ID NO: 20899 - protein, 7 aa, Artificial Sequence
  Description of Artificial Sequence: Synthetic peptide
  XENP019041 vlCDR2
YASHRYT

SEQ ID NO: 20900 - protein, 9 aa, Artificial Sequence
  Description of Artificial Sequence: Synthetic peptide
  XENP019041 vlCDR3
QKDYSSPRT

SEQ ID NO: 20901 - protein, 451 aa, Artificial Sequence; identical to SEQ ID NO: 16221
  Description of Artificial Sequence: Synthetic polypeptide
  XENP019042 1G6_H1_L1.165_IgG1_PVA_/S267K Heavy Chain

SEQ ID NO: 20902 - protein, 122 aa, Artificial Sequence; identical to SEQ ID NO: 10922
  Description of Artificial Sequence: Synthetic polypeptide
  VH of XENP019042

SEQ ID NO: 20903 - protein, 5 aa, Artificial Sequence
  Description of Artificial Sequence: Synthetic peptide
  XENP019042 vhCDR1
NYWMN

SEQ ID NO: 20904 - protein, 19 aa, Artificial Sequence
  Description of Artificial Sequence: Synthetic peptide
  XENP019042 vhCDR2
EIRLKSNNYATHYAEPVKG

SEQ ID NO: 20905 - protein, 11 aa, Artificial Sequence
  Description of Artificial Sequence: Synthetic peptide
  XENP019042 vhCDR3
YYGNYGGYFDV

SEQ ID NO: 20906 - protein, 214 aa, Artificial Sequence
  Description of Artificial Sequence: Synthetic polypeptide
  XENP019042 1G6_H1_L1.165_IgG1_PVA_/S267K Light Chain
SIVMTQSPATLSVSPGERATLSCRASESVSNDVAWYQQKPGQSPRLLINYASHRYTGVPDRFTGSGYGTEFTLTISSLQSEDFAVYFCQQDYKSPRTFGGGTKVEIKRTVAAPSVFIFPPSDEQLKSGTASVVCLLNNFYPREAKVQWKVDNALQSGNSQESVTEQDSKDSTYSLSSTLTLSKADYEKHKVYACEVTHQGLSSPVTKSFNRGEC

SEQ ID NO: 20907 - protein, 107 aa, Artificial Sequence; identical to SEQ ID NO: 15204
  Description of Artificial Sequence: Synthetic polypeptide
  VL of XENP019042

SEQ ID NO: 20908 - protein, 11 aa, Artificial Sequence
  Description of Artificial Sequence: Synthetic peptide
  XENP019042 vlCDR1
RASESVSNDVA

SEQ ID NO: 20909 - protein, 7 aa, Artificial Sequence
  Description of Artificial Sequence: Synthetic peptide
  XENP019042 vlCDR2
YASHRYT

SEQ ID NO: 20910 - protein, 9 aa, Artificial Sequence
  Description of Artificial Sequence: Synthetic peptide
  XENP019042 vlCDR3
QQDYKSPRT

SEQ ID NO: 20911 - protein, 451 aa, Artificial Sequence; identical to SEQ ID NO: 16221
  Description of Artificial Sequence: Synthetic polypeptide
  XENP019043 1G6_H1_L1.166_IgG1_PVA_/S267K Heavy Chain

SEQ ID NO: 20912 - protein, 122 aa, Artificial Sequence; identical to SEQ ID NO: 10922
  Description of Artificial Sequence: Synthetic polypeptide
  VH of XENP019043

SEQ ID NO: 20913 - protein, 5 aa, Artificial Sequence
  Description of Artificial Sequence: Synthetic peptide
  XENP019043 vhCDR1
NYWMN

SEQ ID NO: 20914 - protein, 19 aa, Artificial Sequence
  Description of Artificial Sequence: Synthetic peptide
  XENP019043 vhCDR2
EIRLKSNNYATHYAEPVKG

SEQ ID NO: 20915 - protein, 11 aa, Artificial Sequence
  Description of Artificial Sequence: Synthetic peptide
  XENP019043 vhCDR3
YYGNYGGYFDV

SEQ ID NO: 20916 - protein, 214 aa, Artificial Sequence
  Description of Artificial Sequence: Synthetic polypeptide
  XENP019043 1G6_H1_L1.166_IgG1_PVA_/S267K Light Chain
SIVMTQSPATLSVSPGERATLSCRASQSVSNDVAWYRQKPEQSPRLLINYASHRYTGVPDRFTGSGYGTEFTLTISSLQSEDFAVYFCQQDYSSPRTFGGGTKVEIKRTVAAPSVFIFPPSDEQLKSGTASVVCLLNNFYPREAKVQWKVDNALQSGNSQESVTEQDSKDSTYSLSSTLTLSKADYEKHKVYACEVTHQGLSSPVTKSFNRGEC

SEQ ID NO: 20917 - protein, 107 aa, Artificial Sequence; identical to SEQ ID NO: 15213
  Description of Artificial Sequence: Synthetic polypeptide
  VL of XENP019043

SEQ ID NO: 20918 - protein, 11 aa, Artificial Sequence
  Description of Artificial Sequence: Synthetic peptide
  XENP019043 vlCDR1
RASQSVSNDVA

SEQ ID NO: 20919 - protein, 7 aa, Artificial Sequence
  Description of Artificial Sequence: Synthetic peptide
  XENP019043 vlCDR2
YASHRYT

SEQ ID NO: 20920 - protein, 9 aa, Artificial Sequence
  Description of Artificial Sequence: Synthetic peptide
  XENP019043 vlCDR3
QQDYSSPRT

SEQ ID NO: 20921 - protein, 451 aa, Artificial Sequence; identical to SEQ ID NO: 16221
  Description of Artificial Sequence: Synthetic polypeptide
  XENP019044 1G6_H1_L1.167_IgG1_PVA_/S267K Heavy Chain

SEQ ID NO: 20922 - protein, 122 aa, Artificial Sequence; identical to SEQ ID NO: 10922
  Description of Artificial Sequence: Synthetic polypeptide
  VH of XENP019044

SEQ ID NO: 20923 - protein, 5 aa, Artificial Sequence
  Description of Artificial Sequence: Synthetic peptide
  XENP019044 vhCDR1
NYWMN

SEQ ID NO: 20924 - protein, 19 aa, Artificial Sequence
  Description of Artificial Sequence: Synthetic peptide
  XENP019044 vhCDR2
EIRLKSNNYATHYAEPVKG

SEQ ID NO: 20925 - protein, 11 aa, Artificial Sequence
  Description of Artificial Sequence: Synthetic peptide
  XENP019044 vhCDR3
YYGNYGGYFDV

SEQ ID NO: 20926 - protein, 214 aa, Artificial Sequence
  Description of Artificial Sequence: Synthetic polypeptide
  XENP019044 1G6_H1_L1.167_IgG1_PVA_/S267K Light Chain
SIVMTQSPATLSVSPGERATLSCRASQSVSNDVAWYRQKPGESPRLLINYASHRYTGVPDRFTGSGYGTEFTLTISSLQSEDFAVYFCQQDYSSPRTFGGGTKVEIKRTVAAPSVFIFPPSDEQLKSGTASVVCLLNNFYPREAKVQWKVDNALQSGNSQESVTEQDSKDSTYSLSSTLTLSKADYEKHKVYACEVTHQGLSSPVTKSFNRGEC

SEQ ID NO: 20927 - protein, 107 aa, Artificial Sequence; identical to SEQ ID NO: 15222
  Description of Artificial Sequence: Synthetic polypeptide
  VL of XENP019044

SEQ ID NO: 20928 - protein, 11 aa, Artificial Sequence
  Description of Artificial Sequence: Synthetic peptide
  XENP019044 vlCDR1
RASQSVSNDVA

SEQ ID NO: 20929 - protein, 7 aa, Artificial Sequence
  Description of Artificial Sequence: Synthetic peptide
  XENP019044 vlCDR2
YASHRYT

SEQ ID NO: 20930 - protein, 9 aa, Artificial Sequence
  Description of Artificial Sequence: Synthetic peptide
  XENP019044 vlCDR3
QQDYSSPRT

SEQ ID NO: 20931 - protein, 451 aa, Artificial Sequence; identical to SEQ ID NO: 16221
  Description of Artificial Sequence: Synthetic polypeptide
  XENP019045 1G6_H1_L1.168_IgG1_PVA_/S267K Heavy Chain

SEQ ID NO: 20932 - protein, 122 aa, Artificial Sequence; identical to SEQ ID NO: 10922
  Description of Artificial Sequence: Synthetic polypeptide
  VH of XENP019045

SEQ ID NO: 20933 - protein, 5 aa, Artificial Sequence
  Description of Artificial Sequence: Synthetic peptide
  XENP019045 vhCDR1
NYWMN

SEQ ID NO: 20934 - protein, 19 aa, Artificial Sequence
  Description of Artificial Sequence: Synthetic peptide
  XENP019045 vhCDR2
EIRLKSNNYATHYAEPVKG

SEQ ID NO: 20935 - protein, 11 aa, Artificial Sequence
  Description of Artificial Sequence: Synthetic peptide
  XENP019045 vhCDR3
YYGNYGGYFDV

SEQ ID NO: 20936 - protein, 214 aa, Artificial Sequence
  Description of Artificial Sequence: Synthetic polypeptide
  XENP019045 1G6_H1_L1.168_IgG1_PVA_/S267K Light Chain
SIVMTQSPATLSVSPGERATLSCRASQSVSNDVAWYQQKPGQSPRLLINYASWRYTGVPDRFTGSGYGTEFTLTISSLQSEDFAVYFCQQDFSSPRTFGGGTKVEIKRTVAAPSVFIFPPSDEQLKSGTASVVCLLNNFYPREAKVQWKVDNALQSGNSQESVTEQDSKDSTYSLSSTLTLSKADYEKHKVYACEVTHQGLSSPVTKSFNRGEC

SEQ ID NO: 20937 - protein, 107 aa, Artificial Sequence; identical to SEQ ID NO: 15231
  Description of Artificial Sequence: Synthetic polypeptide
  VL of XENP019045

SEQ ID NO: 20938 - protein, 11 aa, Artificial Sequence
  Description of Artificial Sequence: Synthetic peptide
  XENP019045 vlCDR1
RASQSVSNDVA

SEQ ID NO: 20939 - protein, 7 aa, Artificial Sequence
  Description of Artificial Sequence: Synthetic peptide
  XENP019045 vlCDR2
YASWRYT

SEQ ID NO: 20940 - protein, 9 aa, Artificial Sequence
  Description of Artificial Sequence: Synthetic peptide
  XENP019045 vlCDR3
QQDFSSPRT

SEQ ID NO: 20941 - protein, 451 aa, Artificial Sequence; identical to SEQ ID NO: 16221
  Description of Artificial Sequence: Synthetic polypeptide
  XENP019046 1G6_H1_L1.169_IgG1_PVA_/S267K Heavy Chain

SEQ ID NO: 20942 - protein, 122 aa, Artificial Sequence; identical to SEQ ID NO: 10922
  Description of Artificial Sequence: Synthetic polypeptide
  VH of XENP019046

SEQ ID NO: 20943 - protein, 5 aa, Artificial Sequence
  Description of Artificial Sequence: Synthetic peptide
  XENP019046 vhCDR1
NYWMN

SEQ ID NO: 20944 - protein, 19 aa, Artificial Sequence
  Description of Artificial Sequence: Synthetic peptide
  XENP019046 vhCDR2
EIRLKSNNYATHYAEPVKG

SEQ ID NO: 20945 - protein, 11 aa, Artificial Sequence
  Description of Artificial Sequence: Synthetic peptide
  XENP019046 vhCDR3
YYGNYGGYFDV

SEQ ID NO: 20946 - protein, 214 aa, Artificial Sequence
  Description of Artificial Sequence: Synthetic polypeptide
  XENP019046 1G6_H1_L1.169_IgG1_PVA_/S267K Light Chain
SIVMTQSPATLSVSPGERATLSCRASQSVSNDVAWYQQKPGQSPRLLINYASWRYTGVPDRFTGSGYGTEFTLTISSLQSEDFAVYFCQQDWSSPRTFGGGTKVEIKRTVAAPSVFIFPPSDEQLKSGTASVVCLLNNFYPREAKVQWKVDNALQSGNSQESVTEQDSKDSTYSLSSTLTLSKADYEKHKVYACEVTHQGLSSPVTKSFNRGEC

SEQ ID NO: 20947 - protein, 107 aa, Artificial Sequence; identical to SEQ ID NO: 15240
  Description of Artificial Sequence: Synthetic polypeptide
  VL of XENP019046

SEQ ID NO: 20948 - protein, 11 aa, Artificial Sequence
  Description of Artificial Sequence: Synthetic peptide
  XENP019046 vlCDR1
RASQSVSNDVA

SEQ ID NO: 20949 - protein, 7 aa, Artificial Sequence
  Description of Artificial Sequence: Synthetic peptide
  XENP019046 vlCDR2
YASWRYT

SEQ ID NO: 20950 - protein, 9 aa, Artificial Sequence
  Description of Artificial Sequence: Synthetic peptide
  XENP019046 vlCDR3
QQDWSSPRT

SEQ ID NO: 20951 - protein, 451 aa, Artificial Sequence; identical to SEQ ID NO: 16221
  Description of Artificial Sequence: Synthetic polypeptide
  XENP019047 1G6_H1_L1.170_IgG1_PVA_/S267K Heavy Chain

SEQ ID NO: 20952 - protein, 122 aa, Artificial Sequence; identical to SEQ ID NO: 10922
  Description of Artificial Sequence: Synthetic polypeptide
  VH of XENP019047

SEQ ID NO: 20953 - protein, 5 aa, Artificial Sequence
  Description of Artificial Sequence: Synthetic peptide
  XENP019047 vhCDR1
NYWMN

SEQ ID NO: 20954 - protein, 19 aa, Artificial Sequence
  Description of Artificial Sequence: Synthetic peptide
  XENP019047 vhCDR2
EIRLKSNNYATHYAEPVKG

SEQ ID NO: 20955 - protein, 11 aa, Artificial Sequence
  Description of Artificial Sequence: Synthetic peptide
  XENP019047 vhCDR3
YYGNYGGYFDV

SEQ ID NO: 20956 - protein, 214 aa, Artificial Sequence
  Description of Artificial Sequence: Synthetic polypeptide
  XENP019047 1G6_H1_L1.170_IgG1_PVA_/S267K Light Chain
SIVMTQSPATLSVSPGERATLSCRASQSVSNDVAWYQQKPGQSPRLLINYASWRYTGVPDRFTGSGYGTEFTLTISSLQSEDFAVYFCQQDGSSPRTFGGGTKVEIKRTVAAPSVFIFPPSDEQLKSGTASVVCLLNNFYPREAKVQWKVDNALQSGNSQESVTEQDSKDSTYSLSSTLTLSKADYEKHKVYACEVTHQGLSSPVTKSFNRGEC

SEQ ID NO: 20957 - protein, 107 aa, Artificial Sequence; identical to SEQ ID NO: 15249
  Description of Artificial Sequence: Synthetic polypeptide
  VL of XENP019047

SEQ ID NO: 20958 - protein, 11 aa, Artificial Sequence
  Description of Artificial Sequence: Synthetic peptide
  XENP019047 vlCDR1
RASQSVSNDVA

SEQ ID NO: 20959 - protein, 7 aa, Artificial Sequence
  Description of Artificial Sequence: Synthetic peptide
  XENP019047 vlCDR2
YASWRYT

SEQ ID NO: 20960 - protein, 9 aa, Artificial Sequence
  Description of Artificial Sequence: Synthetic peptide
  XENP019047 vlCDR3
QQDGSSPRT

SEQ ID NO: 20961 - protein, 451 aa, Artificial Sequence; identical to SEQ ID NO: 16221
  Description of Artificial Sequence: Synthetic polypeptide
  XENP019048 1G6_H1_L1.171_IgG1_PVA_/S267K Heavy Chain

SEQ ID NO: 20962 - protein, 122 aa, Artificial Sequence; identical to SEQ ID NO: 10922
  Description of Artificial Sequence: Synthetic polypeptide
  VH of XENP019048

SEQ ID NO: 20963 - protein, 5 aa, Artificial Sequence
  Description of Artificial Sequence: Synthetic peptide
  XENP019048 vhCDR1
NYWMN

SEQ ID NO: 20964 - protein, 19 aa, Artificial Sequence
  Description of Artificial Sequence: Synthetic peptide
  XENP019048 vhCDR2
EIRLKSNNYATHYAEPVKG

SEQ ID NO: 20965 - protein, 11 aa, Artificial Sequence
  Description of Artificial Sequence: Synthetic peptide
  XENP019048 vhCDR3
YYGNYGGYFDV

SEQ ID NO: 20966 - protein, 214 aa, Artificial Sequence
  Description of Artificial Sequence: Synthetic polypeptide
  XENP019048 1G6_H1_L1.171_IgG1_PVA_/S267K Light Chain
SIVMTQSPATLSVSPGERATLSCRASQSVSNDVAWYQQKPGQSPRLLINYASHRYTSVPDRFTGSGYGTEFTLTISSLQSEDFAVYFCQQDWSSPRTFGGGTKVEIKRTVAAPSVFIFPPSDEQLKSGTASVVCLLNNFYPREAKVQWKVDNALQSGNSQESVTEQDSKDSTYSLSSTLTLSKADYEKHKVYACEVTHQGLSSPVTKSFNRGEC

SEQ ID NO: 20967 - protein, 107 aa, Artificial Sequence; identical to SEQ ID NO: 15258
  Description of Artificial Sequence: Synthetic polypeptide
  VL of XENP019048

SEQ ID NO: 20968 - protein, 11 aa, Artificial Sequence
  Description of Artificial Sequence: Synthetic peptide
  XENP019048 vlCDR1
RASQSVSNDVA

SEQ ID NO: 20969 - protein, 7 aa, Artificial Sequence
  Description of Artificial Sequence: Synthetic peptide
  XENP019048 vlCDR2
YASHRYT

SEQ ID NO: 20970 - protein, 9 aa, Artificial Sequence
  Description of Artificial Sequence: Synthetic peptide
  XENP019048 vlCDR3
QQDWSSPRT

SEQ ID NO: 20971 - protein, 451 aa, Artificial Sequence; identical to SEQ ID NO: 16221
  Description of Artificial Sequence: Synthetic polypeptide
  XENP019049 1G6_H1_L1.172_IgG1_PVA_/S267K Heavy Chain

SEQ ID NO: 20972 - protein, 122 aa, Artificial Sequence; identical to SEQ ID NO: 10922
  Description of Artificial Sequence: Synthetic polypeptide
  VH of XENP019049

SEQ ID NO: 20973 - protein, 5 aa, Artificial Sequence
  Description of Artificial Sequence: Synthetic peptide
  XENP019049 vhCDR1
NYWMN

SEQ ID NO: 20974 - protein, 19 aa, Artificial Sequence
  Description of Artificial Sequence: Synthetic peptide
  XENP019049 vhCDR2
EIRLKSNNYATHYAEPVKG

SEQ ID NO: 20975 - protein, 11 aa, Artificial Sequence
  Description of Artificial Sequence: Synthetic peptide
  XENP019049 vhCDR3
YYGNYGGYFDV

SEQ ID NO: 20976 - protein, 214 aa, Artificial Sequence
  Description of Artificial Sequence: Synthetic polypeptide
  XENP019049 1G6_H1_L1.172_IgG1_PVA_/S267K Light Chain
SIVMTQSPATLSVSPGERATLSCRASQSVSNDVAWYQQKPGQSPRLLINYASHRYTSVPDRFTGSGYGTEFTLTISSLQSEDFAVYFCQQDFSSPRTFGGGTKVEIKRTVAAPSVFIFPPSDEQLKSGTASVVCLLNNFYPREAKVQWKVDNALQSGNSQESVTEQDSKDSTYSLSSTLTLSKADYEKHKVYACEVTHQGLSSPVTKSFNRGEC

SEQ ID NO: 20977 - protein, 107 aa, Artificial Sequence; identical to SEQ ID NO: 15267
  Description of Artificial Sequence: Synthetic polypeptide
  VL of XENP019049

SEQ ID NO: 20978 - protein, 11 aa, Artificial Sequence
  Description of Artificial Sequence: Synthetic peptide
  XENP019049 vlCDR1
RASQSVSNDVA

SEQ ID NO: 20979 - protein, 7 aa, Artificial Sequence
  Description of Artificial Sequence: Synthetic peptide
  XENP019049 vlCDR2
YASHRYT

SEQ ID NO: 20980 - protein, 9 aa, Artificial Sequence
  Description of Artificial Sequence: Synthetic peptide
  XENP019049 vlCDR3
QQDFSSPRT

SEQ ID NO: 20981 - protein, 451 aa, Artificial Sequence; identical to SEQ ID NO: 16221
  Description of Artificial Sequence: Synthetic polypeptide
  XENP019050 1G6_H1_L1.173_IgG1_PVA_/S267K Heavy Chain

SEQ ID NO: 20982 - protein, 122 aa, Artificial Sequence; identical to SEQ ID NO: 10922
  Description of Artificial Sequence: Synthetic polypeptide
  VH of XENP019050

SEQ ID NO: 20983 - protein, 5 aa, Artificial Sequence
  Description of Artificial Sequence: Synthetic peptide
  XENP019050 vhCDR1
NYWMN

SEQ ID NO: 20984 - protein, 19 aa, Artificial Sequence
  Description of Artificial Sequence: Synthetic peptide
  XENP019050 vhCDR2
EIRLKSNNYATHYAEPVKG

SEQ ID NO: 20985 - protein, 11 aa, Artificial Sequence
  Description of Artificial Sequence: Synthetic peptide
  XENP019050 vhCDR3
YYGNYGGYFDV

SEQ ID NO: 20986 - protein, 214 aa, Artificial Sequence
  Description of Artificial Sequence: Synthetic polypeptide
  XENP019050 1G6_H1_L1.173_IgG1_PVA_/S267K Light Chain
SIVMTQSPATLSVSPGERATLSCRASQSVSNDVAWYQQKPGQSPRLLINYASHRYTGVPDRFTGSGYGTEFTLTISSLQSEDFAVYFCQQDFGSPRTFGGGTKVEIKRTVAAPSVFIFPPSDEQLKSGTASVVCLLNNFYPREAKVQWKVDNALQSGNSQESVTEQDSKDSTYSLSSTLTLSKADYEKHKVYACEVTHQGLSSPVTKSFNRGEC

SEQ ID NO: 20987 - protein, 107 aa, Artificial Sequence; identical to SEQ ID NO: 15276
  Description of Artificial Sequence: Synthetic polypeptide
  VL of XENP019050

SEQ ID NO: 20988 - protein, 11 aa, Artificial Sequence
  Description of Artificial Sequence: Synthetic peptide
  XENP019050 vlCDR1
RASQSVSNDVA

SEQ ID NO: 20989 - protein, 7 aa, Artificial Sequence
  Description of Artificial Sequence: Synthetic peptide
  XENP019050 vlCDR2
YASHRYT

SEQ ID NO: 20990 - protein, 9 aa, Artificial Sequence
  Description of Artificial Sequence: Synthetic peptide
  XENP019050 vlCDR3
QQDFGSPRT

SEQ ID NO: 20991 - protein, 451 aa, Artificial Sequence; identical to SEQ ID NO: 16221
  Description of Artificial Sequence: Synthetic polypeptide
  XENP019051 1G6_H1_L1.174_IgG1_PVA_/S267K Heavy Chain

SEQ ID NO: 20992 - protein, 122 aa, Artificial Sequence; identical to SEQ ID NO: 10922
  Description of Artificial Sequence: Synthetic polypeptide
  VH of XENP019051

SEQ ID NO: 20993 - protein, 5 aa, Artificial Sequence
  Description of Artificial Sequence: Synthetic peptide
  XENP019051 vhCDR1
NYWMN

SEQ ID NO: 20994 - protein, 19 aa, Artificial Sequence
  Description of Artificial Sequence: Synthetic peptide
  XENP019051 vhCDR2
EIRLKSNNYATHYAEPVKG

SEQ ID NO: 20995 - protein, 11 aa, Artificial Sequence
  Description of Artificial Sequence: Synthetic peptide
  XENP019051 vhCDR3
YYGNYGGYFDV

SEQ ID NO: 20996 - protein, 214 aa, Artificial Sequence
  Description of Artificial Sequence: Synthetic polypeptide
  XENP019051 1G6_H1_L1.174_IgG1_PVA_/S267K Light Chain
SIVMTQSPATLSVSPGERATLSCRASQSVSNDVAWYQQKPGQSPRLLINYASHRYTGVPDRFTGSGYGTEFTLTISSLQSEDFAVYFCQQDWGSPRTFGGGTKVEIKRTVAAPSVFIFPPSDEQLKSGTASVVCLLNNFYPREAKVQWKVDNALQSGNSQESVTEQDSKDSTYSLSSTLTLSKADYEKHKVYACEVTHQGLSSPVTKSFNRGEC

SEQ ID NO: 20997 - protein, 107 aa, Artificial Sequence; identical to SEQ ID NO: 15285
  Description of Artificial Sequence: Synthetic polypeptide
  VL of XENP019051

SEQ ID NO: 20998 - protein, 11 aa, Artificial Sequence
  Description of Artificial Sequence: Synthetic peptide
  XENP019051 vlCDR1
RASQSVSNDVA

SEQ ID NO: 20999 - protein, 7 aa, Artificial Sequence
  Description of Artificial Sequence: Synthetic peptide
  XENP019051 vlCDR2
YASHRYT

SEQ ID NO: 21000 - protein, 9 aa, Artificial Sequence
  Description of Artificial Sequence: Synthetic peptide
  XENP019051 vlCDR3
QQDWGSPRT

SEQ ID NO: 21001 - protein, 451 aa, Artificial Sequence; identical to SEQ ID NO: 16221
  Description of Artificial Sequence: Synthetic polypeptide
  XENP019052 1G6_H1_L1.175_IgG1_PVA_/S267K Heavy Chain

SEQ ID NO: 21002 - protein, 122 aa, Artificial Sequence; identical to SEQ ID NO: 10922
  Description of Artificial Sequence: Synthetic polypeptide
  VH of XENP019052

SEQ ID NO: 21003 - protein, 5 aa, Artificial Sequence
  Description of Artificial Sequence: Synthetic peptide
  XENP019052 vhCDR1
NYWMN

SEQ ID NO: 21004 - protein, 19 aa, Artificial Sequence
  Description of Artificial Sequence: Synthetic peptide
  XENP019052 vhCDR2
EIRLKSNNYATHYAEPVKG

SEQ ID NO: 21005 - protein, 11 aa, Artificial Sequence
  Description of Artificial Sequence: Synthetic peptide
  XENP019052 vhCDR3
YYGNYGGYFDV

SEQ ID NO: 21006 - protein, 214 aa, Artificial Sequence
  Description of Artificial Sequence: Synthetic polypeptide
  XENP019052 1G6_H1_L1.175_IgG1_PVA_/S267K Light Chain
SIVMTQSPATLSVSPGERATLSCRASQSVGNDVAWYQQKPGQSPRLLINYASHRYTSVPDRFTGSGYGTEFTLTISSLQSEDFAVYFCQQDWSSPRTFGGGTKVEIKRTVAAPSVFIFPPSDEQLKSGTASVVCLLNNFYPREAKVQWKVDNALQSGNSQESVTEQDSKDSTYSLSSTLTLSKADYEKHKVYACEVTHQGLSSPVTKSFNRGEC

SEQ ID NO: 21007 - protein, 107 aa, Artificial Sequence; identical to SEQ ID NO: 15294
  Description of Artificial Sequence: Synthetic polypeptide
  VL of XENP019052

SEQ ID NO: 21008 - protein, 11 aa, Artificial Sequence
  Description of Artificial Sequence: Synthetic peptide
  XENP019052 vlCDR1
RASQSVGNDVA

SEQ ID NO: 21009 - protein, 7 aa, Artificial Sequence
  Description of Artificial Sequence: Synthetic peptide
  XENP019052 vlCDR2
YASHRYT

SEQ ID NO: 21010 - protein, 9 aa, Artificial Sequence
  Description of Artificial Sequence: Synthetic peptide
  XENP019052 vlCDR3
QQDWSSPRT

SEQ ID NO: 21011 - protein, 451 aa, Artificial Sequence; identical to SEQ ID NO: 16221
  Description of Artificial Sequence: Synthetic polypeptide
  XENP019053 1G6_H1_L1.176_IgG1_PVA_/S267K Heavy Chain

SEQ ID NO: 21012 - protein, 122 aa, Artificial Sequence; identical to SEQ ID NO: 10922
  Description of Artificial Sequence: Synthetic polypeptide
  VH of XENP019053

SEQ ID NO: 21013 - protein, 5 aa, Artificial Sequence
  Description of Artificial Sequence: Synthetic peptide
  XENP019053 vhCDR1
NYWMN

SEQ ID NO: 21014 - protein, 19 aa, Artificial Sequence
  Description of Artificial Sequence: Synthetic peptide
  XENP019053 vhCDR2
EIRLKSNNYATHYAEPVKG

SEQ ID NO: 21015 - protein, 11 aa, Artificial Sequence
  Description of Artificial Sequence: Synthetic peptide
  XENP019053 vhCDR3
YYGNYGGYFDV

SEQ ID NO: 21016 - protein, 214 aa, Artificial Sequence
  Description of Artificial Sequence: Synthetic polypeptide
  XENP019053 1G6_H1_L1.176_IgG1_PVA_/S267K Light Chain
SIVMTQSPATLSVSPGERATLSCRASQSVGNDVAWYQQKPGQSPRLLINYASWRYTSVPDRFTGSGYGTEFTLTISSLQSEDFAVYFCQQDYSSPRTFGGGTKVEIKRTVAAPSVFIFPPSDEQLKSGTASVVCLLNNFYPREAKVQWKVDNALQSGNSQESVTEQDSKDSTYSLSSTLTLSKADYEKHKVYACEVTHQGLSSPVTKSFNRGEC

SEQ ID NO: 21017 - protein, 107 aa, Artificial Sequence; identical to SEQ ID NO: 15303
  Description of Artificial Sequence: Synthetic polypeptide
  VL of XENP019053

SEQ ID NO: 21018 - protein, 11 aa, Artificial Sequence
  Description of Artificial Sequence: Synthetic peptide
  XENP019053 vlCDR1
RASQSVGNDVA

SEQ ID NO: 21019 - protein, 7 aa, Artificial Sequence
  Description of Artificial Sequence: Synthetic peptide
  XENP019053 vlCDR2
YASWRYT

SEQ ID NO: 21020 - protein, 9 aa, Artificial Sequence
  Description of Artificial Sequence: Synthetic peptide
  XENP019053 vlCDR3
QQDYSSPRT

SEQ ID NO: 21021 - protein, 451 aa, Artificial Sequence; identical to SEQ ID NO: 16221
  Description of Artificial Sequence: Synthetic polypeptide
  XENP019054 1G6_H1_L1.177_IgG1_PVA_/S267K Heavy Chain

SEQ ID NO: 21022 - protein, 122 aa, Artificial Sequence; identical to SEQ ID NO: 10922
  Description of Artificial Sequence: Synthetic polypeptide
  VH of XENP019054

SEQ ID NO: 21023 - protein, 5 aa, Artificial Sequence
  Description of Artificial Sequence: Synthetic peptide
  XENP019054 vhCDR1
NYWMN

SEQ ID NO: 21024 - protein, 19 aa, Artificial Sequence
  Description of Artificial Sequence: Synthetic peptide
  XENP019054 vhCDR2
EIRLKSNNYATHYAEPVKG

SEQ ID NO: 21025 - protein, 11 aa, Artificial Sequence
  Description of Artificial Sequence: Synthetic peptide
  XENP019054 vhCDR3
YYGNYGGYFDV

SEQ ID NO: 21026 - protein, 214 aa, Artificial Sequence
  Description of Artificial Sequence: Synthetic polypeptide
  XENP019054 1G6_H1_L1.177_IgG1_PVA_/S267K Light Chain
SIVMTQSPATLSVSPGERATLSCRASQSVGNDVAWYQQKPGQSPRLLINYASHRYTSVPDRFTGSGYGTEFTLTISSLQSEDFAVYFCQQDFSSPRTFGGGTKVEIKRTVAAPSVFIFPPSDEQLKSGTASVVCLLNNFYPREAKVQWKVDNALQSGNSQESVTEQDSKDSTYSLSSTLTLSKADYEKHKVYACEVTHQGLSSPVTKSFNRGEC

SEQ ID NO: 21027 - protein, 107 aa, Artificial Sequence; identical to SEQ ID NO: 15312
  Description of Artificial Sequence: Synthetic polypeptide
  VL of XENP019054

SEQ ID NO: 21028 - protein, 11 aa, Artificial Sequence
  Description of Artificial Sequence: Synthetic peptide
  XENP019054 vlCDR1
RASQSVGNDVA

SEQ ID NO: 21029 - protein, 7 aa, Artificial Sequence
  Description of Artificial Sequence: Synthetic peptide
  XENP019054 vlCDR2
YASHRYT

SEQ ID NO: 21030 - protein, 9 aa, Artificial Sequence
  Description of Artificial Sequence: Synthetic peptide
  XENP019054 vlCDR3
QQDFSSPRT

SEQ ID NO: 21031 - protein, 451 aa, Artificial Sequence; identical to SEQ ID NO: 16221
  Description of Artificial Sequence: Synthetic polypeptide
  XENP019055 1G6_H1_L1.178_IgG1_PVA_/S267K Heavy Chain

SEQ ID NO: 21032 - protein, 122 aa, Artificial Sequence; identical to SEQ ID NO: 10922
  Description of Artificial Sequence: Synthetic polypeptide
  VH of XENP019055

SEQ ID NO: 21033 - protein, 5 aa, Artificial Sequence
  Description of Artificial Sequence: Synthetic peptide
  XENP019055 vhCDR1
NYWMN

SEQ ID NO: 21034 - protein, 19 aa, Artificial Sequence
  Description of Artificial Sequence: Synthetic peptide
  XENP019055 vhCDR2
EIRLKSNNYATHYAEPVKG

SEQ ID NO: 21035 - protein, 11 aa, Artificial Sequence
  Description of Artificial Sequence: Synthetic peptide
  XENP019055 vhCDR3
YYGNYGGYFDV

SEQ ID NO: 21036 - protein, 214 aa, Artificial Sequence
  Description of Artificial Sequence: Synthetic polypeptide
  XENP019055 1G6_H1_L1.178_IgG1_PVA_/S267K Light Chain
SIVMTQSPATLSVSPGERATLSCRASQSVGNDVAWYQQKPGQSPRLLINYASHRYTSVPDRFTGSGYGTEFTLTISSLQSEDFAVYFCQQDGSSPRTFGGGTKVEIKRTVAAPSVFIFPPSDEQLKSGTASVVCLLNNFYPREAKVQWKVDNALQSGNSQESVTEQDSKDSTYSLSSTLTLSKADYEKHKVYACEVTHQGLSSPVTKSFNRGEC

SEQ ID NO: 21037 - protein, 107 aa, Artificial Sequence; identical to SEQ ID NO: 15321
  Description of Artificial Sequence: Synthetic polypeptide
  VL of XENP019055

SEQ ID NO: 21038 - protein, 11 aa, Artificial Sequence
  Description of Artificial Sequence: Synthetic peptide
  XENP019055 vlCDR1
RASQSVGNDVA

SEQ ID NO: 21039 - protein, 7 aa, Artificial Sequence
  Description of Artificial Sequence: Synthetic peptide
  XENP019055 vlCDR2
YASHRYT

SEQ ID NO: 21040 - protein, 9 aa, Artificial Sequence
  Description of Artificial Sequence: Synthetic peptide
  XENP019055 vlCDR3
QQDGSSPRT

SEQ ID NO: 21041 - protein, 451 aa, Artificial Sequence; identical to SEQ ID NO: 16221
  Description of Artificial Sequence: Synthetic polypeptide
  XENP019056 1G6_H1_L1.179_IgG1_PVA_/S267K Heavy Chain

SEQ ID NO: 21042 - protein, 122 aa, Artificial Sequence; identical to SEQ ID NO: 10922
  Description of Artificial Sequence: Synthetic polypeptide
  VH of XENP019056

SEQ ID NO: 21043 - protein, 5 aa, Artificial Sequence
  Description of Artificial Sequence: Synthetic peptide
  XENP019056 vhCDR1
NYWMN

SEQ ID NO: 21044 - protein, 19 aa, Artificial Sequence
  Description of Artificial Sequence: Synthetic peptide
  XENP019056 vhCDR2
EIRLKSNNYATHYAEPVKG

SEQ ID NO: 21045 - protein, 11 aa, Artificial Sequence
  Description of Artificial Sequence: Synthetic peptide
  XENP019056 vhCDR3
YYGNYGGYFDV

SEQ ID NO: 21046 - protein, 214 aa, Artificial Sequence
  Description of Artificial Sequence: Synthetic polypeptide
  XENP019056 1G6_H1_L1.179_IgG1_PVA_/S267K Light Chain
SIVMTQSPATLSVSPGERATLSCRASQSVSNDVAWYQQKPGQSPRLLINYASWRYTSVPDRFTGSGYGTEFTLTISSLQSEDFAVYFCQQDFSSPRTFGGGTKVEIKRTVAAPSVFIFPPSDEQLKSGTASVVCLLNNFYPREAKVQWKVDNALQSGNSQESVTEQDSKDSTYSLSSTLTLSKADYEKHKVYACEVTHQGLSSPVTKSFNRGEC

SEQ ID NO: 21047 - protein, 107 aa, Artificial Sequence; identical to SEQ ID NO: 15330
  Description of Artificial Sequence: Synthetic polypeptide
  VL of XENP019056

SEQ ID NO: 21048 - protein, 11 aa, Artificial Sequence
  Description of Artificial Sequence: Synthetic peptide
  XENP019056 vlCDR1
RASQSVSNDVA

SEQ ID NO: 21049 - protein, 7 aa, Artificial Sequence
  Description of Artificial Sequence: Synthetic peptide
  XENP019056 vlCDR2
YASWRYT

SEQ ID NO: 21050 - protein, 9 aa, Artificial Sequence
  Description of Artificial Sequence: Synthetic peptide
  XENP019056 vlCDR3
QQDFSSPRT

SEQ ID NO: 21051 - protein, 451 aa, Artificial Sequence; identical to SEQ ID NO: 16221
  Description of Artificial Sequence: Synthetic polypeptide
  XENP019057 1G6_H1_L1.180_IgG1_PVA_/S267K Heavy Chain

SEQ ID NO: 21052 - protein, 122 aa, Artificial Sequence; identical to SEQ ID NO: 10922
  Description of Artificial Sequence: Synthetic polypeptide
  VH of XENP019057

SEQ ID NO: 21053 - protein, 5 aa, Artificial Sequence
  Description of Artificial Sequence: Synthetic peptide
  XENP019057 vhCDR1
NYWMN

SEQ ID NO: 21054 - protein, 19 aa, Artificial Sequence
  Description of Artificial Sequence: Synthetic peptide
  XENP019057 vhCDR2
EIRLKSNNYATHYAEPVKG

SEQ ID NO: 21055 - protein, 11 aa, Artificial Sequence
  Description of Artificial Sequence: Synthetic peptide
  XENP019057 vhCDR3
YYGNYGGYFDV

SEQ ID NO: 21056 - protein, 214 aa, Artificial Sequence
  Description of Artificial Sequence: Synthetic polypeptide
  XENP019057 1G6_H1_L1.180_IgG1_PVA_/S267K Light Chain
SIVMTQSPATLSVSPGERATLSCRASQSVSNDVAWYQQKPGQSPRLLINYASWRYTSVPDRFTGSGYGTEFTLTISSLQSEDFAVYFCQQDWSSPRTFGGGTKVEIKRTVAAPSVFIFPPSDEQLKSGTASVVCLLNNFYPREAKVQWKVDNALQSGNSQESVTEQDSKDSTYSLSSTLTLSKADYEKHKVYACEVTHQGLSSPVTKSFNRGEC

SEQ ID NO: 21057 - protein, 107 aa, Artificial Sequence; identical to SEQ ID NO: 15339
  Description of Artificial Sequence: Synthetic polypeptide
  VL of XENP019057

SEQ ID NO: 21058 - protein, 11 aa, Artificial Sequence
  Description of Artificial Sequence: Synthetic peptide
  XENP019057 vlCDR1
RASQSVSNDVA

SEQ ID NO: 21059 - protein, 7 aa, Artificial Sequence
  Description of Artificial Sequence: Synthetic peptide
  XENP019057 vlCDR2
YASWRYT

SEQ ID NO: 21060 - protein, 9 aa, Artificial Sequence
  Description of Artificial Sequence: Synthetic peptide
  XENP019057 vlCDR3
QQDWSSPRT

SEQ ID NO: 21061 - protein, 451 aa, Artificial Sequence; identical to SEQ ID NO: 16221
  Description of Artificial Sequence: Synthetic polypeptide
  XENP019058 1G6_H1_L1.181_IgG1_PVA_/S267K Heavy Chain

SEQ ID NO: 21062 - protein, 122 aa, Artificial Sequence; identical to SEQ ID NO: 10922
  Description of Artificial Sequence: Synthetic polypeptide
  VH of XENP019058

SEQ ID NO: 21063 - protein, 5 aa, Artificial Sequence
  Description of Artificial Sequence: Synthetic peptide
  XENP019058 vhCDR1
NYWMN

SEQ ID NO: 21064 - protein, 19 aa, Artificial Sequence
  Description of Artificial Sequence: Synthetic peptide
  XENP019058 vhCDR2
EIRLKSNNYATHYAEPVKG

SEQ ID NO: 21065 - protein, 11 aa, Artificial Sequence
  Description of Artificial Sequence: Synthetic peptide
  XENP019058 vhCDR3
YYGNYGGYFDV

SEQ ID NO: 21066 - protein, 214 aa, Artificial Sequence
  Description of Artificial Sequence: Synthetic polypeptide
  XENP019058 1G6_H1_L1.181_IgG1_PVA_/S267K Light Chain
SIVMTQSPATLSVSPGERATLSCRASQSVSNDVAWYQQKPGQSPRLLINYASWRYTSVPDRFTGSGYGTEFTLTISSLQSEDFAVYFCQQDGSSPRTFGGGTKVEIKRTVAAPSVFIFPPSDEQLKSGTASVVCLLNNFYPREAKVQWKVDNALQSGNSQESVTEQDSKDSTYSLSSTLTLSKADYEKHKVYACEVTHQGLSSPVTKSFNRGEC

SEQ ID NO: 21067 - protein, 107 aa, Artificial Sequence; identical to SEQ ID NO: 15348
  Description of Artificial Sequence: Synthetic polypeptide
  VL of XENP019058

SEQ ID NO: 21068 - protein, 11 aa, Artificial Sequence
  Description of Artificial Sequence: Synthetic peptide
  XENP019058 vlCDR1
RASQSVSNDVA

SEQ ID NO: 21069 - protein, 7 aa, Artificial Sequence
  Description of Artificial Sequence: Synthetic peptide
  XENP019058 vlCDR2
YASWRYT

SEQ ID NO: 21070 - protein, 9 aa, Artificial Sequence
  Description of Artificial Sequence: Synthetic peptide
  XENP019058 vlCDR3
QQDGSSPRT

SEQ ID NO: 21071 - protein, 451 aa, Artificial Sequence; identical to SEQ ID NO: 16221
  Description of Artificial Sequence: Synthetic polypeptide
  XENP019059 1G6_H1_L1.182_IgG1_PVA_/S267K Heavy Chain

SEQ ID NO: 21072 - protein, 122 aa, Artificial Sequence; identical to SEQ ID NO: 10922
  Description of Artificial Sequence: Synthetic polypeptide
  VH of XENP019059

SEQ ID NO: 21073 - protein, 5 aa, Artificial Sequence
  Description of Artificial Sequence: Synthetic peptide
  XENP019059 vhCDR1
NYWMN

SEQ ID NO: 21074 - protein, 19 aa, Artificial Sequence
  Description of Artificial Sequence: Synthetic peptide
  XENP019059 vhCDR2
EIRLKSNNYATHYAEPVKG

SEQ ID NO: 21075 - protein, 11 aa, Artificial Sequence
  Description of Artificial Sequence: Synthetic peptide
  XENP019059 vhCDR3
YYGNYGGYFDV

SEQ ID NO: 21076 - protein, 214 aa, Artificial Sequence
  Description of Artificial Sequence: Synthetic polypeptide
  XENP019059 1G6_H1_L1.182_IgG1_PVA_/S267K Light Chain
SIVMTQSPATLSVSPGERATLSCRASQSVGNDVAWYQQKPGQSPRLLINYASWRYTSVPDRFTGSGYGTEFTLTISSLQSEDFAVYFCQQDWSSPRTFGGGTKVEIKRTVAAPSVFIFPPSDEQLKSGTASVVCLLNNFYPREAKVQWKVDNALQSGNSQESVTEQDSKDSTYSLSSTLTLSKADYEKHKVYACEVTHQGLSSPVTKSFNRGEC

SEQ ID NO: 21077 - protein, 107 aa, Artificial Sequence; identical to SEQ ID NO: 15357
  Description of Artificial Sequence: Synthetic polypeptide
  VL of XENP019059

SEQ ID NO: 21078 - protein, 11 aa, Artificial Sequence
  Description of Artificial Sequence: Synthetic peptide
  XENP019059 vlCDR1
RASQSVGNDVA

SEQ ID NO: 21079 - protein, 7 aa, Artificial Sequence
  Description of Artificial Sequence: Synthetic peptide
  XENP019059 vlCDR2
YASWRYT

SEQ ID NO: 21080 - protein, 9 aa, Artificial Sequence
  Description of Artificial Sequence: Synthetic peptide
  XENP019059 vlCDR3
QQDWSSPRT

SEQ ID NO: 21081 - protein, 451 aa, Artificial Sequence; identical to SEQ ID NO: 16221
  Description of Artificial Sequence: Synthetic polypeptide
  XENP019060 1G6_H1_L1.183_IgG1_PVA_/S267K Heavy Chain

SEQ ID NO: 21082 - protein, 122 aa, Artificial Sequence; identical to SEQ ID NO: 10922
  Description of Artificial Sequence: Synthetic polypeptide
  VH of XENP019060

SEQ ID NO: 21083 - protein, 5 aa, Artificial Sequence
  Description of Artificial Sequence: Synthetic peptide
  XENP019060 vhCDR1
NYWMN

SEQ ID NO: 21084 - protein, 19 aa, Artificial Sequence
  Description of Artificial Sequence: Synthetic peptide
  XENP019060 vhCDR2
EIRLKSNNYATHYAEPVKG

SEQ ID NO: 21085 - protein, 11 aa, Artificial Sequence
  Description of Artificial Sequence: Synthetic peptide
  XENP019060 vhCDR3
YYGNYGGYFDV

SEQ ID NO: 21086 - protein, 214 aa, Artificial Sequence
  Description of Artificial Sequence: Synthetic polypeptide
  XENP019060 1G6_H1_L1.183_IgG1_PVA_/S267K Light Chain
SIVMTQSPATLSVSPGERATLSCRASQSVGNDVAWYQQKPGQSPRLLINYASWRYTSVPDRFTGSGYGTEFTLTISSLQSEDFAVYFCQQDFSSPRTFGGGTKVEIKRTVAAPSVFIFPPSDEQLKSGTASVVCLLNNFYPREAKVQWKVDNALQSGNSQESVTEQDSKDSTYSLSSTLTLSKADYEKHKVYACEVTHQGLSSPVTKSFNRGEC

SEQ ID NO: 21087 - protein, 107 aa, Artificial Sequence; identical to SEQ ID NO: 15366
  Description of Artificial Sequence: Synthetic polypeptide
  VL of XENP019060

SEQ ID NO: 21088 - protein, 11 aa, Artificial Sequence
  Description of Artificial Sequence: Synthetic peptide
  XENP019060 vlCDR1
RASQSVGNDVA

SEQ ID NO: 21089 - protein, 7 aa, Artificial Sequence
  Description of Artificial Sequence: Synthetic peptide
  XENP019060 vlCDR2
YASWRYT

SEQ ID NO: 21090 - protein, 9 aa, Artificial Sequence
  Description of Artificial Sequence: Synthetic peptide
  XENP019060 vlCDR3
QQDFSSPRT

SEQ ID NO: 21091 - protein, 451 aa, Artificial Sequence; identical to SEQ ID NO: 16221
  Description of Artificial Sequence: Synthetic polypeptide
  XENP019061 1G6_H1_L1.184_IgG1_PVA_/S267K Heavy Chain

SEQ ID NO: 21092 - protein, 122 aa, Artificial Sequence; identical to SEQ ID NO: 10922
  Description of Artificial Sequence: Synthetic polypeptide
  VH of XENP019061

SEQ ID NO: 21093 - protein, 5 aa, Artificial Sequence
  Description of Artificial Sequence: Synthetic peptide
  XENP019061 vhCDR1
NYWMN

SEQ ID NO: 21094 - protein, 19 aa, Artificial Sequence
  Description of Artificial Sequence: Synthetic peptide
  XENP019061 vhCDR2
EIRLKSNNYATHYAEPVKG

SEQ ID NO: 21095 - protein, 11 aa, Artificial Sequence
  Description of Artificial Sequence: Synthetic peptide
  XENP019061 vhCDR3
YYGNYGGYFDV

SEQ ID NO: 21096 - protein, 214 aa, Artificial Sequence
  Description of Artificial Sequence: Synthetic polypeptide
  XENP019061 1G6_H1_L1.184_IgG1_PVA_/S267K Light Chain
SIVMTQSPATLSVSPGERATLSCRASQSVGNDVAWYQQKPGQSPRLLINYASWRYTSVPDRFTGSGYGTEFTLTISSLQSEDFAVYFCQQDGSSPRTFGGGTKVEIKRTVAAPSVFIFPPSDEQLKSGTASVVCLLNNFYPREAKVQWKVDNALQSGNSQESVTEQDSKDSTYSLSSTLTLSKADYEKHKVYACEVTHQGLSSPVTKSFNRGEC

SEQ ID NO: 21097 - protein, 107 aa, Artificial Sequence; identical to SEQ ID NO: 15375
  Description of Artificial Sequence: Synthetic polypeptide
  VL of XENP019061

SEQ ID NO: 21098 - protein, 11 aa, Artificial Sequence
  Description of Artificial Sequence: Synthetic peptide
  XENP019061 vlCDR1
RASQSVGNDVA

SEQ ID NO: 21099 - protein, 7 aa, Artificial Sequence
  Description of Artificial Sequence: Synthetic peptide
  XENP019061 vlCDR2
YASWRYT

SEQ ID NO: 21100 - protein, 9 aa, Artificial Sequence
  Description of Artificial Sequence: Synthetic peptide
  XENP019061 vlCDR3
QQDGSSPRT

SEQ ID NO: 21101 - protein, 451 aa, Artificial Sequence; identical to SEQ ID NO: 16221
  Description of Artificial Sequence: Synthetic polypeptide
  XENP019062 1G6_H1_L1.185_IgG1_PVA_/S267K Heavy Chain

SEQ ID NO: 21102 - protein, 122 aa, Artificial Sequence; identical to SEQ ID NO: 10922
  Description of Artificial Sequence: Synthetic polypeptide
  VH of XENP019062

SEQ ID NO: 21103 - protein, 5 aa, Artificial Sequence
  Description of Artificial Sequence: Synthetic peptide
  XENP019062 vhCDR1
NYWMN

SEQ ID NO: 21104 - protein, 19 aa, Artificial Sequence
  Description of Artificial Sequence: Synthetic peptide
  XENP019062 vhCDR2
EIRLKSNNYATHYAEPVKG

SEQ ID NO: 21105 - protein, 11 aa, Artificial Sequence
  Description of Artificial Sequence: Synthetic peptide
  XENP019062 vhCDR3
YYGNYGGYFDV

SEQ ID NO: 21106 - protein, 214 aa, Artificial Sequence
  Description of Artificial Sequence: Synthetic polypeptide
  XENP019062 1G6_H1_L1.185_IgG1_PVA_/S267K Light Chain
EIVMTQSPATLSVSPGERATLSCRASQSVSNDLAWYQQKPGQSPRLLINYASHRYTGVPARFSGSGYGTEFTLTISSLQSEDFAVYYCQQDYSSPRTFGGGTKVEIKRTVAAPSVFIFPPSDEQLKSGTASVVCLLNNFYPREAKVQWKVDNALQSGNSQESVTEQDSKDSTYSLSSTLTLSKADYEKHKVYACEVTHQGLSSPVTKSFNRGEC

SEQ ID NO: 21107 - protein, 107 aa, Artificial Sequence; identical to SEQ ID NO: 15384
  Description of Artificial Sequence: Synthetic polypeptide
  VL of XENP019062

SEQ ID NO: 21108 - protein, 11 aa, Artificial Sequence
  Description of Artificial Sequence: Synthetic peptide
  XENP019062 vlCDR1
RASQSVSNDLA

SEQ ID NO: 21109 - protein, 7 aa, Artificial Sequence
  Description of Artificial Sequence: Synthetic peptide
  XENP019062 vlCDR2
YASHRYT

SEQ ID NO: 21110 - protein, 9 aa, Artificial Sequence
  Description of Artificial Sequence: Synthetic peptide
  XENP019062 vlCDR3
QQDYSSPRT

SEQ ID NO: 21111 - protein, 451 aa, Artificial Sequence; identical to SEQ ID NO: 16221
  Description of Artificial Sequence: Synthetic polypeptide
  XENP019063 1G6_H1_L1.186_IgG1_PVA_/S267K Heavy Chain

SEQ ID NO: 21112 - protein, 122 aa, Artificial Sequence; identical to SEQ ID NO: 10922
  Description of Artificial Sequence: Synthetic polypeptide
  VH of XENP019063

SEQ ID NO: 21113 - protein, 5 aa, Artificial Sequence
  Description of Artificial Sequence: Synthetic peptide
  XENP019063 vhCDR1
NYWMN

SEQ ID NO: 21114 - protein, 19 aa, Artificial Sequence
  Description of Artificial Sequence: Synthetic peptide
  XENP019063 vhCDR2
EIRLKSNNYATHYAEPVKG

SEQ ID NO: 21115 - protein, 11 aa, Artificial Sequence
  Description of Artificial Sequence: Synthetic peptide
  XENP019063 vhCDR3
YYGNYGGYFDV

SEQ ID NO: 21116 - protein, 214 aa, Artificial Sequence
  Description of Artificial Sequence: Synthetic polypeptide
  XENP019063 1G6_H1_L1.186_IgG1_PVA_/S267K Light Chain
DIVMTQSPATLSVSPGERATLSCRASQSVSNDLAWYQQKPGQSPRLLINYASHRYTGVPDRFSGSGYGTEFTLTISSLQSEDFAVYYCQQDYSSPRTFGGGTKVEIKRTVAAPSVFIFPPSDEQLKSGTASVVCLLNNFYPREAKVQWKVDNALQSGNSQESVTEQDSKDSTYSLSSTLTLSKADYEKHKVYACEVTHQGLSSPVTKSFNRGEC

SEQ ID NO: 21117 - protein, 107 aa, Artificial Sequence; identical to SEQ ID NO: 15393
  Description of Artificial Sequence: Synthetic polypeptide
  VL of XENP019063

SEQ ID NO: 21118 - protein, 11 aa, Artificial Sequence
  Description of Artificial Sequence: Synthetic peptide
  XENP019063 vlCDR1
RASQSVSNDLA

SEQ ID NO: 21119 - protein, 7 aa, Artificial Sequence
  Description of Artificial Sequence: Synthetic peptide
  XENP019063 vlCDR2
YASHRYT

SEQ ID NO: 21120 - protein, 9 aa, Artificial Sequence
  Description of Artificial Sequence: Synthetic peptide
  XENP019063 vlCDR3
QQDYSSPRT

SEQ ID NO: 21121 - protein, 451 aa, Artificial Sequence; identical to SEQ ID NO: 20621
  Description of Artificial Sequence: Synthetic polypeptide
  XENP019160 1G6_H1.269_L1.116_IgG1_PVA_/S267K Heavy Chain

SEQ ID NO: 21122 - protein, 122 aa, Artificial Sequence; identical to SEQ ID NO: 14951
  Description of Artificial Sequence: Synthetic polypeptide
  VH of XENP019160

SEQ ID NO: 21123 - protein, 5 aa, Artificial Sequence
  Description of Artificial Sequence: Synthetic peptide
  XENP019160 vhCDR1
NFWMN

SEQ ID NO: 21124 - protein, 19 aa, Artificial Sequence
  Description of Artificial Sequence: Synthetic peptide
  XENP019160 vhCDR2
EIRLYSNNYATHYAEPVKG

SEQ ID NO: 21125 - protein, 11 aa, Artificial Sequence
  Description of Artificial Sequence: Synthetic peptide
  XENP019160 vhCDR3
YYGNYGGYFDV

SEQ ID NO: 21126 - protein, 214 aa, Artificial Sequence; identical to SEQ ID NO: 19936
  Description of Artificial Sequence: Synthetic polypeptide
  XENP019160 1G6_H1.269_L1.116_IgG1_PVA_/S267K Light Chain

SEQ ID NO: 21127 - protein, 107 aa, Artificial Sequence; identical to SEQ ID NO: 14214
  Description of Artificial Sequence: Synthetic polypeptide
  VL of XENP019160

SEQ ID NO: 21128 - protein, 11 aa, Artificial Sequence
  Description of Artificial Sequence: Synthetic peptide
  XENP019160 vlCDR1
RASQSVSNDVA

SEQ ID NO: 21129 - protein, 7 aa, Artificial Sequence
  Description of Artificial Sequence: Synthetic peptide
  XENP019160 vlCDR2
YASHRYT

SEQ ID NO: 21130 - protein, 9 aa, Artificial Sequence
  Description of Artificial Sequence: Synthetic peptide
  XENP019160 vlCDR3
QQDFSSPRT

SEQ ID NO: 21131 - protein, 451 aa, Artificial Sequence; identical to SEQ ID NO: 20641
  Description of Artificial Sequence: Synthetic polypeptide
  XENP019161 1G6_H1.271_L1.116_IgG1_PVA_/S267K Heavy Chain

SEQ ID NO: 21132 - protein, 122 aa, Artificial Sequence; identical to SEQ ID NO: 14969
  Description of Artificial Sequence: Synthetic polypeptide
  VH of XENP019161

SEQ ID NO: 21133 - protein, 5 aa, Artificial Sequence
  Description of Artificial Sequence: Synthetic peptide
  XENP019161 vhCDR1
NYWMN

SEQ ID NO: 21134 - protein, 19 aa, Artificial Sequence
  Description of Artificial Sequence: Synthetic peptide
  XENP019161 vhCDR2
EIRLYSNNYATHYAEPVKG

SEQ ID NO: 21135 - protein, 11 aa, Artificial Sequence
  Description of Artificial Sequence: Synthetic peptide
  XENP019161 vhCDR3
YYGNYGGYFDV

SEQ ID NO: 21136 - protein, 214 aa, Artificial Sequence; identical to SEQ ID NO: 19936
  Description of Artificial Sequence: Synthetic polypeptide
  XENP019161 1G6_H1.271_L1.116_IgG1_PVA_/S267K Light Chain

SEQ ID NO: 21137 - protein, 107 aa, Artificial Sequence; identical to SEQ ID NO: 14214
  Description of Artificial Sequence: Synthetic polypeptide
  VL of XENP019161

SEQ ID NO: 21138 - protein, 11 aa, Artificial Sequence
  Description of Artificial Sequence: Synthetic peptide
  XENP019161 vlCDR1
RASQSVSNDVA

SEQ ID NO: 21139 - protein, 7 aa, Artificial Sequence
  Description of Artificial Sequence: Synthetic peptide
  XENP019161 vlCDR2
YASHRYT

SEQ ID NO: 21140 - protein, 9 aa, Artificial Sequence
  Description of Artificial Sequence: Synthetic peptide
  XENP019161 vlCDR3
QQDFSSPRT

SEQ ID NO: 21141 - protein, 451 aa, Artificial Sequence; identical to SEQ ID NO: 20651
  Description of Artificial Sequence: Synthetic polypeptide
  XENP019162 1G6_H1.272_L1.116_IgG1_PVA_/S267K Heavy Chain

SEQ ID NO: 21142 - protein, 122 aa, Artificial Sequence; identical to SEQ ID NO: 14978
  Description of Artificial Sequence: Synthetic polypeptide
  VH of XENP019162

SEQ ID NO: 21143 - protein, 5 aa, Artificial Sequence
  Description of Artificial Sequence: Synthetic peptide
  XENP019162 vhCDR1
NFWMN

SEQ ID NO: 21144 - protein, 19 aa, Artificial Sequence
  Description of Artificial Sequence: Synthetic peptide
  XENP019162 vhCDR2
EIRLYSNNYATHYAEPVKG

SEQ ID NO: 21145 - protein, 11 aa, Artificial Sequence
  Description of Artificial Sequence: Synthetic peptide
  XENP019162 vhCDR3
YYGNYGGYFDV

SEQ ID NO: 21146 - protein, 214 aa, Artificial Sequence; identical to SEQ ID NO: 19936
  Description of Artificial Sequence: Synthetic polypeptide
  XENP019162 1G6_H1.272_L1.116_IgG1_PVA_/S267K Light Chain

SEQ ID NO: 21147 - protein, 107 aa, Artificial Sequence; identical to SEQ ID NO: 14214
  Description of Artificial Sequence: Synthetic polypeptide
  VL of XENP019162

SEQ ID NO: 21148 - protein, 11 aa, Artificial Sequence
  Description of Artificial Sequence: Synthetic peptide
  XENP019162 vlCDR1
RASQSVSNDVA

SEQ ID NO: 21149 - protein, 7 aa, Artificial Sequence
  Description of Artificial Sequence: Synthetic peptide
  XENP019162 vlCDR2
YASHRYT

SEQ ID NO: 21150 - protein, 9 aa, Artificial Sequence
  Description of Artificial Sequence: Synthetic peptide
  XENP019162 vlCDR3
QQDFSSPRT

SEQ ID NO: 21151 - protein, 451 aa, Artificial Sequence; identical to SEQ ID NO: 17291
  Description of Artificial Sequence: Synthetic polypeptide
  XENP019163 1G6_H1.90_L1.177_IgG1_PVA_/S267K Heavy Chain

SEQ ID NO: 21152 - protein, 122 aa, Artificial Sequence; identical to SEQ ID NO: 11837
  Description of Artificial Sequence: Synthetic polypeptide
  VH of XENP019163

SEQ ID NO: 21153 - protein, 5 aa, Artificial Sequence
  Description of Artificial Sequence: Synthetic peptide
  XENP019163 vhCDR1
NYWMN

SEQ ID NO: 21154 - protein, 19 aa, Artificial Sequence
  Description of Artificial Sequence: Synthetic peptide
  XENP019163 vhCDR2
EIRLYSNNYATHYAEPVKG

SEQ ID NO: 21155 - protein, 11 aa, Artificial Sequence
  Description of Artificial Sequence: Synthetic peptide
  XENP019163 vhCDR3
YYGNYGGYFDV

SEQ ID NO: 21156 - protein, 214 aa, Artificial Sequence; identical to SEQ ID NO: 21026
  Description of Artificial Sequence: Synthetic polypeptide
  XENP019163 1G6_H1.90_L1.177_IgG1_PVA_/S267K Light Chain

SEQ ID NO: 21157 - protein, 107 aa, Artificial Sequence; identical to SEQ ID NO: 15312
  Description of Artificial Sequence: Synthetic polypeptide
  VL of XENP019163

SEQ ID NO: 21158 - protein, 11 aa, Artificial Sequence
  Description of Artificial Sequence: Synthetic peptide
  XENP019163 vlCDR1
RASQSVGNDVA

SEQ ID NO: 21159 - protein, 7 aa, Artificial Sequence
  Description of Artificial Sequence: Synthetic peptide
  XENP019163 vlCDR2
YASHRYT

SEQ ID NO: 21160 - protein, 9 aa, Artificial Sequence
  Description of Artificial Sequence: Synthetic peptide
  XENP019163 vlCDR3
QQDFSSPRT

SEQ ID NO: 21161 - protein, 451 aa, Artificial Sequence; identical to SEQ ID NO: 20621
  Description of Artificial Sequence: Synthetic polypeptide
  XENP019164 1G6_H1.269_L1.177_IgG1_PVA_/S267K Heavy Chain

SEQ ID NO: 21162 - protein, 122 aa, Artificial Sequence; identical to SEQ ID NO: 14951
  Description of Artificial Sequence: Synthetic polypeptide
  VH of XENP019164

SEQ ID NO: 21163 - protein, 5 aa, Artificial Sequence
  Description of Artificial Sequence: Synthetic peptide
  XENP019164 vhCDR1
NFWMN

SEQ ID NO: 21164 - protein, 19 aa, Artificial Sequence
  Description of Artificial Sequence: Synthetic peptide
  XENP019164 vhCDR2
EIRLYSNNYATHYAEPVKG

SEQ ID NO: 21165 - protein, 11 aa, Artificial Sequence
  Description of Artificial Sequence: Synthetic peptide
  XENP019164 vhCDR3
YYGNYGGYFDV

SEQ ID NO: 21166 - protein, 214 aa, Artificial Sequence; identical to SEQ ID NO: 21026
  Description of Artificial Sequence: Synthetic polypeptide
  XENP019164 1G6_H1.269_L1.177_IgG1_PVA_/S267K Light Chain

SEQ ID NO: 21167 - protein, 107 aa, Artificial Sequence; identical to SEQ ID NO: 15312
  Description of Artificial Sequence: Synthetic polypeptide
  VL of XENP019164

SEQ ID NO: 21168 - protein, 11 aa, Artificial Sequence
  Description of Artificial Sequence: Synthetic peptide
  XENP019164 vlCDR1
RASQSVGNDVA

SEQ ID NO: 21169 - protein, 7 aa, Artificial Sequence
  Description of Artificial Sequence: Synthetic peptide
  XENP019164 vlCDR2
YASHRYT

SEQ ID NO: 21170 - protein, 9 aa, Artificial Sequence
  Description of Artificial Sequence: Synthetic peptide
  XENP019164 vlCDR3
QQDFSSPRT

SEQ ID NO: 21171 - protein, 451 aa, Artificial Sequence; identical to SEQ ID NO: 20641
  Description of Artificial Sequence: Synthetic polypeptide
  XENP019165 1G6_H1.271_L1.177_IgG1_PVA_/S267K Heavy Chain

SEQ ID NO: 21172 - protein, 122 aa, Artificial Sequence; identical to SEQ ID NO: 14969
  Description of Artificial Sequence: Synthetic polypeptide
  VH of XENP019165

SEQ ID NO: 21173 - protein, 5 aa, Artificial Sequence
  Description of Artificial Sequence: Synthetic peptide
  XENP019165 vhCDR1
NYWMN

SEQ ID NO: 21174 - protein, 19 aa, Artificial Sequence
  Description of Artificial Sequence: Synthetic peptide
  XENP019165 vhCDR2
EIRLYSNNYATHYAEPVKG

SEQ ID NO: 21175 - protein, 11 aa, Artificial Sequence
  Description of Artificial Sequence: Synthetic peptide
  XENP019165 vhCDR3
YYGNYGGYFDV

SEQ ID NO: 21176 - protein, 214 aa, Artificial Sequence; identical to SEQ ID NO: 21026
  Description of Artificial Sequence: Synthetic polypeptide
  XENP019165 1G6_H1.271_L1.177_IgG1_PVA_/S267K Light Chain

SEQ ID NO: 21177 - protein, 107 aa, Artificial Sequence; identical to SEQ ID NO: 15312
  Description of Artificial Sequence: Synthetic polypeptide
  VL of XENP019165

SEQ ID NO: 21178 - protein, 11 aa, Artificial Sequence
  Description of Artificial Sequence: Synthetic peptide
  XENP019165 vlCDR1
RASQSVGNDVA

SEQ ID NO: 21179 - protein, 7 aa, Artificial Sequence
  Description of Artificial Sequence: Synthetic peptide
  XENP019165 vlCDR2
YASHRYT

SEQ ID NO: 21180 - protein, 9 aa, Artificial Sequence
  Description of Artificial Sequence: Synthetic peptide
  XENP019165 vlCDR3
QQDFSSPRT

SEQ ID NO: 21181 - protein, 451 aa, Artificial Sequence; identical to SEQ ID NO: 20651
  Description of Artificial Sequence: Synthetic polypeptide
  XENP019166 1G6_H1.272_L1.177_IgG1_PVA_/S267K Heavy Chain

SEQ ID NO: 21182 - protein, 122 aa, Artificial Sequence; identical to SEQ ID NO: 14978
  Description of Artificial Sequence: Synthetic polypeptide
  VH of XENP019166

SEQ ID NO: 21183 - protein, 5 aa, Artificial Sequence
  Description of Artificial Sequence: Synthetic peptide
  XENP019166 vhCDR1
NFWMN

SEQ ID NO: 21184 - protein, 19 aa, Artificial Sequence
  Description of Artificial Sequence: Synthetic peptide
  XENP019166 vhCDR2
EIRLYSNNYATHYAEPVKG

SEQ ID NO: 21185 - protein, 11 aa, Artificial Sequence
  Description of Artificial Sequence: Synthetic peptide
  XENP019166 vhCDR3
YYGNYGGYFDV

SEQ ID NO: 21186 - protein, 214 aa, Artificial Sequence; identical to SEQ ID NO: 21026
  Description of Artificial Sequence: Synthetic polypeptide
  XENP019166 1G6_H1.272_L1.177_IgG1_PVA_/S267K Light Chain

SEQ ID NO: 21187 - protein, 107 aa, Artificial Sequence; identical to SEQ ID NO: 15312
  Description of Artificial Sequence: Synthetic polypeptide
  VL of XENP019166

SEQ ID NO: 21188 - protein, 11 aa, Artificial Sequence
  Description of Artificial Sequence: Synthetic peptide
  XENP019166 vlCDR1
RASQSVGNDVA

SEQ ID NO: 21189 - protein, 7 aa, Artificial Sequence
  Description of Artificial Sequence: Synthetic peptide
  XENP019166 vlCDR2
YASHRYT

SEQ ID NO: 21190 - protein, 9 aa, Artificial Sequence
  Description of Artificial Sequence: Synthetic peptide
  XENP019166 vlCDR3
QQDFSSPRT

SEQ ID NO: 21191 - protein, 451 aa, Artificial Sequence; identical to SEQ ID NO: 17291
  Description of Artificial Sequence: Synthetic polypeptide
  XENP019167 1G6_H1.90_L1.175_IgG1_PVA_/S267K Heavy Chain

SEQ ID NO: 21192 - protein, 122 aa, Artificial Sequence; identical to SEQ ID NO: 11837
  Description of Artificial Sequence: Synthetic polypeptide
  VH of XENP019167

SEQ ID NO: 21193 - protein, 5 aa, Artificial Sequence
  Description of Artificial Sequence: Synthetic peptide
  XENP019167 vhCDR1
NYWMN

SEQ ID NO: 21194 - protein, 19 aa, Artificial Sequence
  Description of Artificial Sequence: Synthetic peptide
  XENP019167 vhCDR2
EIRLYSNNYATHYAEPVKG

SEQ ID NO: 21195 - protein, 11 aa, Artificial Sequence
  Description of Artificial Sequence: Synthetic peptide
  XENP019167 vhCDR3
YYGNYGGYFDV

SEQ ID NO: 21196 - protein, 214 aa, Artificial Sequence; identical to SEQ ID NO: 21006
  Description of Artificial Sequence: Synthetic polypeptide
  XENP019167 1G6_H1.90_L1.175_IgG1_PVA_/S267K Light Chain

SEQ ID NO: 21197 - protein, 107 aa, Artificial Sequence; identical to SEQ ID NO: 15294
  Description of Artificial Sequence: Synthetic polypeptide
  VL of XENP019167

SEQ ID NO: 21198 - protein, 11 aa, Artificial Sequence
  Description of Artificial Sequence: Synthetic peptide
  XENP019167 vlCDR1
RASQSVGNDVA

SEQ ID NO: 21199 - protein, 7 aa, Artificial Sequence
  Description of Artificial Sequence: Synthetic peptide
  XENP019167 vlCDR2
YASHRYT

SEQ ID NO: 21200 - protein, 9 aa, Artificial Sequence
  Description of Artificial Sequence: Synthetic peptide
  XENP019167 vlCDR3
QQDWSSPRT

SEQ ID NO: 21201 - protein, 451 aa, Artificial Sequence; identical to SEQ ID NO: 20621
  Description of Artificial Sequence: Synthetic polypeptide
  XENP019168 1G6_H1.269_L1.175_IgG1_PVA_/S267K Heavy Chain

SEQ ID NO: 21202 - protein, 122 aa, Artificial Sequence; identical to SEQ ID NO: 14951
  Description of Artificial Sequence: Synthetic polypeptide
  VH of XENP019168

SEQ ID NO: 21203 - protein, 5 aa, Artificial Sequence
  Description of Artificial Sequence: Synthetic peptide
  XENP019168 vhCDR1
NFWMN

SEQ ID NO: 21204 - protein, 19 aa, Artificial Sequence
  Description of Artificial Sequence: Synthetic peptide
  XENP019168 vhCDR2
EIRLYSNNYATHYAEPVKG

SEQ ID NO: 21205 - protein, 11 aa, Artificial Sequence
  Description of Artificial Sequence: Synthetic peptide
  XENP019168 vhCDR3
YYGNYGGYFDV

SEQ ID NO: 21206 - protein, 214 aa, Artificial Sequence; identical to SEQ ID NO: 21006
  Description of Artificial Sequence: Synthetic polypeptide
  XENP019168 1G6_H1.269_L1.175_IgG1_PVA_/S267K Light Chain

SEQ ID NO: 21207 - protein, 107 aa, Artificial Sequence; identical to SEQ ID NO: 15294
  Description of Artificial Sequence: Synthetic polypeptide
  VL of XENP019168

SEQ ID NO: 21208 - protein, 11 aa, Artificial Sequence
  Description of Artificial Sequence: Synthetic peptide
  XENP019168 vlCDR1
RASQSVGNDVA

SEQ ID NO: 21209 - protein, 7 aa, Artificial Sequence
  Description of Artificial Sequence: Synthetic peptide
  XENP019168 vlCDR2
YASHRYT

SEQ ID NO: 21210 - protein, 9 aa, Artificial Sequence
  Description of Artificial Sequence: Synthetic peptide
  XENP019168 vlCDR3
QQDWSSPRT

SEQ ID NO: 21211 - protein, 451 aa, Artificial Sequence; identical to SEQ ID NO: 20641
  Description of Artificial Sequence: Synthetic polypeptide
  XENP019169 1G6_H1.271_L1.175_IgG1_PVA_/S267K Heavy Chain

SEQ ID NO: 21212 - protein, 122 aa, Artificial Sequence; identical to SEQ ID NO: 14969
  Description of Artificial Sequence: Synthetic polypeptide
  VH of XENP019169

SEQ ID NO: 21213 - protein, 5 aa, Artificial Sequence
  Description of Artificial Sequence: Synthetic peptide
  XENP019169 vhCDR1
NYWMN

SEQ ID NO: 21214 - protein, 19 aa, Artificial Sequence
  Description of Artificial Sequence: Synthetic peptide
  XENP019169 vhCDR2
EIRLYSNNYATHYAEPVKG

SEQ ID NO: 21215 - protein, 11 aa, Artificial Sequence
  Description of Artificial Sequence: Synthetic peptide
  XENP019169 vhCDR3
YYGNYGGYFDV

SEQ ID NO: 21216 - protein, 214 aa, Artificial Sequence; identical to SEQ ID NO: 21006
  Description of Artificial Sequence: Synthetic polypeptide
  XENP019169 1G6_H1.271_L1.175_IgG1_PVA_/S267K Light Chain

SEQ ID NO: 21217 - protein, 107 aa, Artificial Sequence; identical to SEQ ID NO: 15294
  Description of Artificial Sequence: Synthetic polypeptide
  VL of XENP019169

SEQ ID NO: 21218 - protein, 11 aa, Artificial Sequence
  Description of Artificial Sequence: Synthetic peptide
  XENP019169 vlCDR1
RASQSVGNDVA

SEQ ID NO: 21219 - protein, 7 aa, Artificial Sequence
  Description of Artificial Sequence: Synthetic peptide
  XENP019169 vlCDR2
YASHRYT

SEQ ID NO: 21220 - protein, 9 aa, Artificial Sequence
  Description of Artificial Sequence: Synthetic peptide
  XENP019169 vlCDR3
QQDWSSPRT

SEQ ID NO: 21221 - protein, 451 aa, Artificial Sequence; identical to SEQ ID NO: 20651
  Description of Artificial Sequence: Synthetic polypeptide
  XENP019170 1G6_H1.272_L1.175_IgG1_PVA_/S267K Heavy Chain

SEQ ID NO: 21222 - protein, 122 aa, Artificial Sequence; identical to SEQ ID NO: 14978
  Description of Artificial Sequence: Synthetic polypeptide
  VH of XENP019170

SEQ ID NO: 21223 - protein, 5 aa, Artificial Sequence
  Description of Artificial Sequence: Synthetic peptide
  XENP019170 vhCDR1
NFWMN

SEQ ID NO: 21224 - protein, 19 aa, Artificial Sequence
  Description of Artificial Sequence: Synthetic peptide
  XENP019170 vhCDR2
EIRLYSNNYATHYAEPVKG

SEQ ID NO: 21225 - protein, 11 aa, Artificial Sequence
  Description of Artificial Sequence: Synthetic peptide
  XENP019170 vhCDR3
YYGNYGGYFDV

SEQ ID NO: 21226 - protein, 214 aa, Artificial Sequence; identical to SEQ ID NO: 21006
  Description of Artificial Sequence: Synthetic polypeptide
  XENP019170 1G6_H1.272_L1.175_IgG1_PVA_/S267K Light Chain

SEQ ID NO: 21227 - protein, 107 aa, Artificial Sequence; identical to SEQ ID NO: 15294
  Description of Artificial Sequence: Synthetic polypeptide
  VL of XENP019170

SEQ ID NO: 21228 - protein, 11 aa, Artificial Sequence
  Description of Artificial Sequence: Synthetic peptide
  XENP019170 vlCDR1
RASQSVGNDVA

SEQ ID NO: 21229 - protein, 7 aa, Artificial Sequence
  Description of Artificial Sequence: Synthetic peptide
  XENP019170 vlCDR2
YASHRYT

SEQ ID NO: 21230 - protein, 9 aa, Artificial Sequence
  Description of Artificial Sequence: Synthetic peptide
  XENP019170 vlCDR3
QQDWSSPRT

SEQ ID NO: 21231 - protein, 451 aa, Artificial Sequence; identical to SEQ ID NO: 16221
  Description of Artificial Sequence: Synthetic polypeptide
  XENP019172 1G6_H1_L1.190_IgG1_PVA_/S267K Heavy Chain

SEQ ID NO: 21232 - protein, 122 aa, Artificial Sequence; identical to SEQ ID NO: 10922
  Description of Artificial Sequence: Synthetic polypeptide
  VH of XENP019172

SEQ ID NO: 21233 - protein, 5 aa, Artificial Sequence
  Description of Artificial Sequence: Synthetic peptide
  XENP019172 vhCDR1
NYWMN

SEQ ID NO: 21234 - protein, 19 aa, Artificial Sequence
  Description of Artificial Sequence: Synthetic peptide
  XENP019172 vhCDR2
EIRLKSNNYATHYAEPVKG

SEQ ID NO: 21235 - protein, 11 aa, Artificial Sequence
  Description of Artificial Sequence: Synthetic peptide
  XENP019172 vhCDR3
YYGNYGGYFDV

SEQ ID NO: 21236 - protein, 214 aa, Artificial Sequence
  Description of Artificial Sequence: Synthetic polypeptide
  XENP019172 1G6_H1_L1.190_IgG1_PVA_/S267K Light Chain
SIVMTQSPATLSVSPGERATLSCRASQSVGNDVAWYQQKPGQSPRLLINYASHRYTGVPDRFTGSGYGTEFTLTISSLQSEDFAVYFCQQDFSSPRTFGGGTKVEIKRTVAAPSVFIFPPSDEQLKSGTASVVCLLNNFYPREAKVQWKVDNALQSGNSQESVTEQDSKDSTYSLSSTLTLSKADYEKHKVYACEVTHQGLSSPVTKSFNRGEC

SEQ ID NO: 21237 - protein, 107 aa, Artificial Sequence; identical to SEQ ID NO: 15504
  Description of Artificial Sequence: Synthetic polypeptide
  VL of XENP019172

SEQ ID NO: 21238 - protein, 11 aa, Artificial Sequence
  Description of Artificial Sequence: Synthetic peptide
  XENP019172 vlCDR1
RASQSVGNDVA

SEQ ID NO: 21239 - protein, 7 aa, Artificial Sequence
  Description of Artificial Sequence: Synthetic peptide
  XENP019172 vlCDR2
YASHRYT

SEQ ID NO: 21240 - protein, 9 aa, Artificial Sequence
  Description of Artificial Sequence: Synthetic peptide
  XENP019172 vlCDR3
QQDFSSPRT

SEQ ID NO: 21241 - protein, 451 aa, Artificial Sequence; identical to SEQ ID NO: 16221
  Description of Artificial Sequence: Synthetic polypeptide
  XENP019173 1G6_H1_L1.191_IgG1_PVA_/S267K Heavy Chain

SEQ ID NO: 21242 - protein, 122 aa, Artificial Sequence; identical to SEQ ID NO: 10922
  Description of Artificial Sequence: Synthetic polypeptide
  VH of XENP019173

SEQ ID NO: 21243 - protein, 5 aa, Artificial Sequence
  Description of Artificial Sequence: Synthetic peptide
  XENP019173 vhCDR1
NYWMN

SEQ ID NO: 21244 - protein, 19 aa, Artificial Sequence
  Description of Artificial Sequence: Synthetic peptide
  XENP019173 vhCDR2
EIRLKSNNYATHYAEPVKG

SEQ ID NO: 21245 - protein, 11 aa, Artificial Sequence
  Description of Artificial Sequence: Synthetic peptide
  XENP019173 vhCDR3
YYGNYGGYFDV

SEQ ID NO: 21246 - protein, 214 aa, Artificial Sequence
  Description of Artificial Sequence: Synthetic polypeptide
  XENP019173 1G6_H1_L1.191_IgG1_PVA_/S267K Light Chain
SIVMTQSPATLSVSPGERATLSCRASQSVGNDVAWYQQKPGQSPRLLINYASHRYTGVPDRFTGSGYGTEFTLTISSLQSEDFAVYFCQQDWSSPRTFGGGTKVEIKRTVAAPSVFIFPPSDEQLKSGTASVVCLLNNFYPREAKVQWKVDNALQSGNSQESVTEQDSKDSTYSLSSTLTLSKADYEKHKVYACEVTHQGLSSPVTKSFNRGEC

SEQ ID NO: 21247 - protein, 107 aa, Artificial Sequence; identical to SEQ ID NO: 15513
  Description of Artificial Sequence: Synthetic polypeptide
  VL of XENP019173

SEQ ID NO: 21248 - protein, 11 aa, Artificial Sequence
  Description of Artificial Sequence: Synthetic peptide
  XENP019173 vlCDR1
RASQSVGNDVA

SEQ ID NO: 21249 - protein, 7 aa, Artificial Sequence
  Description of Artificial Sequence: Synthetic peptide
  XENP019173 vlCDR2
YASHRYT

SEQ ID NO: 21250 - protein, 9 aa, Artificial Sequence
  Description of Artificial Sequence: Synthetic peptide
  XENP019173 vlCDR3
QQDWSSPRT

SEQ ID NO: 21251 - protein, 451 aa, Artificial Sequence; identical to SEQ ID NO: 17291
  Description of Artificial Sequence: Synthetic polypeptide
  XENP019174 1G6_H1.90_L1.190_IgG1_PVA_/S267K Heavy Chain

SEQ ID NO: 21252 - protein, 122 aa, Artificial Sequence; identical to SEQ ID NO: 11837
  Description of Artificial Sequence: Synthetic polypeptide
  VH of XENP019174

SEQ ID NO: 21253 - protein, 5 aa, Artificial Sequence
  Description of Artificial Sequence: Synthetic peptide
  XENP019174 vhCDR1
NYWMN

SEQ ID NO: 21254 - protein, 19 aa, Artificial Sequence
  Description of Artificial Sequence: Synthetic peptide
  XENP019174 vhCDR2
EIRLYSNNYATHYAEPVKG

SEQ ID NO: 21255 - protein, 11 aa, Artificial Sequence
  Description of Artificial Sequence: Synthetic peptide
  XENP019174 vhCDR3
YYGNYGGYFDV

SEQ ID NO: 21256 - protein, 214 aa, Artificial Sequence; identical to SEQ ID NO: 21236
  Description of Artificial Sequence: Synthetic polypeptide
  XENP019174 1G6_H1.90_L1.190_IgG1_PVA_/S267K Light Chain

SEQ ID NO: 21257 - protein, 107 aa, Artificial Sequence; identical to SEQ ID NO: 15504
  Description of Artificial Sequence: Synthetic polypeptide
  VL of XENP019174

SEQ ID NO: 21258 - protein, 11 aa, Artificial Sequence
  Description of Artificial Sequence: Synthetic peptide
  XENP019174 vlCDR1
RASQSVGNDVA

SEQ ID NO: 21259 - protein, 7 aa, Artificial Sequence
  Description of Artificial Sequence: Synthetic peptide
  XENP019174 vlCDR2
YASHRYT

SEQ ID NO: 21260 - protein, 9 aa, Artificial Sequence
  Description of Artificial Sequence: Synthetic peptide
  XENP019174 vlCDR3
QQDFSSPRT

SEQ ID NO: 21261 - protein, 451 aa, Artificial Sequence; identical to SEQ ID NO: 17291
  Description of Artificial Sequence: Synthetic polypeptide
  XENP019175 1G6_H1.90_L1.191_IgG1_PVA_/S267K Heavy Chain

SEQ ID NO: 21262 - protein, 122 aa, Artificial Sequence; identical to SEQ ID NO: 11837
  Description of Artificial Sequence: Synthetic polypeptide
  VH of XENP019175

SEQ ID NO: 21263 - protein, 5 aa, Artificial Sequence
  Description of Artificial Sequence: Synthetic peptide
  XENP019175 vhCDR1
NYWMN

SEQ ID NO: 21264 - protein, 19 aa, Artificial Sequence
  Description of Artificial Sequence: Synthetic peptide
  XENP019175 vhCDR2
EIRLYSNNYATHYAEPVKG

SEQ ID NO: 21265 - protein, 11 aa, Artificial Sequence
  Description of Artificial Sequence: Synthetic peptide
  XENP019175 vhCDR3
YYGNYGGYFDV

SEQ ID NO: 21266 - protein, 214 aa, Artificial Sequence; identical to SEQ ID NO: 21246
  Description of Artificial Sequence: Synthetic polypeptide
  XENP019175 1G6_H1.90_L1.191_IgG1_PVA_/S267K Light Chain

SEQ ID NO: 21267 - protein, 107 aa, Artificial Sequence; identical to SEQ ID NO: 15513
  Description of Artificial Sequence: Synthetic polypeptide
  VL of XENP019175

SEQ ID NO: 21268 - protein, 11 aa, Artificial Sequence
  Description of Artificial Sequence: Synthetic peptide
  XENP019175 vlCDR1
RASQSVGNDVA

SEQ ID NO: 21269 - protein, 7 aa, Artificial Sequence
  Description of Artificial Sequence: Synthetic peptide
  XENP019175 vlCDR2
YASHRYT

SEQ ID NO: 21270 - protein, 9 aa, Artificial Sequence
  Description of Artificial Sequence: Synthetic peptide
  XENP019175 vlCDR3
QQDWSSPRT

SEQ ID NO: 21271 - protein, 451 aa, Artificial Sequence; identical to SEQ ID NO: 20621
  Description of Artificial Sequence: Synthetic polypeptide
  XENP019176 1G6_H1.269_L1.190_IgG1_PVA_/S267K Heavy Chain

SEQ ID NO: 21272 - protein, 122 aa, Artificial Sequence; identical to SEQ ID NO: 14951
  Description of Artificial Sequence: Synthetic polypeptide
  VH of XENP019176

SEQ ID NO: 21273 - protein, 5 aa, Artificial Sequence
  Description of Artificial Sequence: Synthetic peptide
  XENP019176 vhCDR1
NFWMN

SEQ ID NO: 21274 - protein, 19 aa, Artificial Sequence
  Description of Artificial Sequence: Synthetic peptide
  XENP019176 vhCDR2
EIRLYSNNYATHYAEPVKG

SEQ ID NO: 21275 - protein, 11 aa, Artificial Sequence
  Description of Artificial Sequence: Synthetic peptide
  XENP019176 vhCDR3
YYGNYGGYFDV

SEQ ID NO: 21276 - protein, 214 aa, Artificial Sequence; identical to SEQ ID NO: 21236
  Description of Artificial Sequence: Synthetic polypeptide
  XENP019176 1G6_H1.269_L1.190_IgG1_PVA_/S267K Light Chain

SEQ ID NO: 21277 - protein, 107 aa, Artificial Sequence; identical to SEQ ID NO: 15504
  Description of Artificial Sequence: Synthetic polypeptide
  VL of XENP019176

SEQ ID NO: 21278 - protein, 11 aa, Artificial Sequence
  Description of Artificial Sequence: Synthetic peptide
  XENP019176 vlCDR1
RASQSVGNDVA

SEQ ID NO: 21279 - protein, 7 aa, Artificial Sequence
  Description of Artificial Sequence: Synthetic peptide
  XENP019176 vlCDR2
YASHRYT

SEQ ID NO: 21280 - protein, 9 aa, Artificial Sequence
  Description of Artificial Sequence: Synthetic peptide
  XENP019176 vlCDR3
QQDFSSPRT

SEQ ID NO: 21281 - protein, 451 aa, Artificial Sequence; identical to SEQ ID NO: 20641
  Description of Artificial Sequence: Synthetic polypeptide
  XENP019177 1G6_H1.271_L1.190_IgG1_PVA_/S267K Heavy Chain

SEQ ID NO: 21282 - protein, 122 aa, Artificial Sequence; identical to SEQ ID NO: 14969
  Description of Artificial Sequence: Synthetic polypeptide
  VH of XENP019177

SEQ ID NO: 21283 - protein, 5 aa, Artificial Sequence
  Description of Artificial Sequence: Synthetic peptide
  XENP019177 vhCDR1
NYWMN

SEQ ID NO: 21284 - protein, 19 aa, Artificial Sequence
  Description of Artificial Sequence: Synthetic peptide
  XENP019177 vhCDR2
EIRLYSNNYATHYAEPVKG

SEQ ID NO: 21285 - protein, 11 aa, Artificial Sequence
  Description of Artificial Sequence: Synthetic peptide
  XENP019177 vhCDR3
YYGNYGGYFDV

SEQ ID NO: 21286 - protein, 214 aa, Artificial Sequence; identical to SEQ ID NO: 21236
  Description of Artificial Sequence: Synthetic polypeptide
  XENP019177 1G6_H1.271_L1.190_IgG1_PVA_/S267K Light Chain

SEQ ID NO: 21287 - protein, 107 aa, Artificial Sequence; identical to SEQ ID NO: 15504
  Description of Artificial Sequence: Synthetic polypeptide
  VL of XENP019177

SEQ ID NO: 21288 - protein, 11 aa, Artificial Sequence
  Description of Artificial Sequence: Synthetic peptide
  XENP019177 vlCDR1
RASQSVGNDVA

SEQ ID NO: 21289 - protein, 7 aa, Artificial Sequence
  Description of Artificial Sequence: Synthetic peptide
  XENP019177 vlCDR2
YASHRYT

SEQ ID NO: 21290 - protein, 9 aa, Artificial Sequence
  Description of Artificial Sequence: Synthetic peptide
  XENP019177 vlCDR3
QQDFSSPRT

SEQ ID NO: 21291 - protein, 451 aa, Artificial Sequence; identical to SEQ ID NO: 20651
  Description of Artificial Sequence: Synthetic polypeptide
  XENP019178 1G6_H1.272_L1.190_IgG1_PVA_/S267K Heavy Chain

SEQ ID NO: 21292 - protein, 122 aa, Artificial Sequence; identical to SEQ ID NO: 14978
  Description of Artificial Sequence: Synthetic polypeptide
  VH of XENP019178

SEQ ID NO: 21293 - protein, 5 aa, Artificial Sequence
  Description of Artificial Sequence: Synthetic peptide
  XENP019178 vhCDR1
NFWMN

SEQ ID NO: 21294 - protein, 19 aa, Artificial Sequence
  Description of Artificial Sequence: Synthetic peptide
  XENP019178 vhCDR2
EIRLYSNNYATHYAEPVKG

SEQ ID NO: 21295 - protein, 11 aa, Artificial Sequence
  Description of Artificial Sequence: Synthetic peptide
  XENP019178 vhCDR3
YYGNYGGYFDV

SEQ ID NO: 21296 - protein, 214 aa, Artificial Sequence; identical to SEQ ID NO: 21236
  Description of Artificial Sequence: Synthetic polypeptide
  XENP019178 1G6_H1.272_L1.190_IgG1_PVA_/S267K Light Chain

SEQ ID NO: 21297 - protein, 107 aa, Artificial Sequence; identical to SEQ ID NO: 15504
  Description of Artificial Sequence: Synthetic polypeptide
  VL of XENP019178

SEQ ID NO: 21298 - protein, 11 aa, Artificial Sequence
  Description of Artificial Sequence: Synthetic peptide
  XENP019178 vlCDR1
RASQSVGNDVA

SEQ ID NO: 21299 - protein, 7 aa, Artificial Sequence
  Description of Artificial Sequence: Synthetic peptide
  XENP019178 vlCDR2
YASHRYT

SEQ ID NO: 21300 - protein, 9 aa, Artificial Sequence
  Description of Artificial Sequence: Synthetic peptide
  XENP019178 vlCDR3
QQDFSSPRT

SEQ ID NO: 21301 - protein, 451 aa, Artificial Sequence; identical to SEQ ID NO: 20621
  Description of Artificial Sequence: Synthetic polypeptide
  XENP019179 1G6_H1.269_L1.191_IgG1_PVA_/S267K Heavy Chain

SEQ ID NO: 21302 - protein, 122 aa, Artificial Sequence; identical to SEQ ID NO: 14951
  Description of Artificial Sequence: Synthetic polypeptide
  VH of XENP019179

SEQ ID NO: 21303 - protein, 5 aa, Artificial Sequence
  Description of Artificial Sequence: Synthetic peptide
  XENP019179 vhCDR1
NFWMN

SEQ ID NO: 21304 - protein, 19 aa, Artificial Sequence
  Description of Artificial Sequence: Synthetic peptide
  XENP019179 vhCDR2
EIRLYSNNYATHYAEPVKG

SEQ ID NO: 21305 - protein, 11 aa, Artificial Sequence
  Description of Artificial Sequence: Synthetic peptide
  XENP019179 vhCDR3
YYGNYGGYFDV

SEQ ID NO: 21306 - protein, 214 aa, Artificial Sequence; identical to SEQ ID NO: 21246
  Description of Artificial Sequence: Synthetic polypeptide
  XENP019179 1G6_H1.269_L1.191_IgG1_PVA_/S267K Light Chain

SEQ ID NO: 21307 - protein, 107 aa, Artificial Sequence; identical to SEQ ID NO: 15513
  Description of Artificial Sequence: Synthetic polypeptide
  VL of XENP019179

SEQ ID NO: 21308 - protein, 11 aa, Artificial Sequence
  Description of Artificial Sequence: Synthetic peptide
  XENP019179 vlCDR1
RASQSVGNDVA

SEQ ID NO: 21309 - protein, 7 aa, Artificial Sequence
  Description of Artificial Sequence: Synthetic peptide
  XENP019179 vlCDR2
YASHRYT

SEQ ID NO: 21310 - protein, 9 aa, Artificial Sequence
  Description of Artificial Sequence: Synthetic peptide
  XENP019179 vlCDR3
QQDWSSPRT

SEQ ID NO: 21311 - protein, 451 aa, Artificial Sequence; identical to SEQ ID NO: 20641
  Description of Artificial Sequence: Synthetic polypeptide
  XENP019180 1G6_H1.271_L1.191_IgG1_PVA_/S267K Heavy Chain

SEQ ID NO: 21312 - protein, 122 aa, Artificial Sequence; identical to SEQ ID NO: 14969
  Description of Artificial Sequence: Synthetic polypeptide
  VH of XENP019180

SEQ ID NO: 21313 - protein, 5 aa, Artificial Sequence
  Description of Artificial Sequence: Synthetic peptide
  XENP019180 vhCDR1
NYWMN

SEQ ID NO: 21314 - protein, 19 aa, Artificial Sequence
  Description of Artificial Sequence: Synthetic peptide
  XENP019180 vhCDR2
EIRLYSNNYATHYAEPVKG

SEQ ID NO: 21315 - protein, 11 aa, Artificial Sequence
  Description of Artificial Sequence: Synthetic peptide
  XENP019180 vhCDR3
YYGNYGGYFDV

SEQ ID NO: 21316 - protein, 214 aa, Artificial Sequence; identical to SEQ ID NO: 21246
  Description of Artificial Sequence: Synthetic polypeptide
  XENP019180 1G6_H1.271_L1.191_IgG1_PVA_/S267K Light Chain

SEQ ID NO: 21317 - protein, 107 aa, Artificial Sequence; identical to SEQ ID NO: 15513
  Description of Artificial Sequence: Synthetic polypeptide
  VL of XENP019180

SEQ ID NO: 21318 - protein, 11 aa, Artificial Sequence
  Description of Artificial Sequence: Synthetic peptide
  XENP019180 vlCDR1
RASQSVGNDVA

SEQ ID NO: 21319 - protein, 7 aa, Artificial Sequence
  Description of Artificial Sequence: Synthetic peptide
  XENP019180 vlCDR2
YASHRYT

SEQ ID NO: 21320 - protein, 9 aa, Artificial Sequence
  Description of Artificial Sequence: Synthetic peptide
  XENP019180 vlCDR3
QQDWSSPRT

SEQ ID NO: 21321 - protein, 451 aa, Artificial Sequence; identical to SEQ ID NO: 20651
  Description of Artificial Sequence: Synthetic polypeptide
  XENP019181 1G6_H1.272_L1.191_IgG1_PVA_/S267K Heavy Chain

SEQ ID NO: 21322 - protein, 122 aa, Artificial Sequence; identical to SEQ ID NO: 14978
  Description of Artificial Sequence: Synthetic polypeptide
  VH of XENP019181

SEQ ID NO: 21323 - protein, 5 aa, Artificial Sequence
  Description of Artificial Sequence: Synthetic peptide
  XENP019181 vhCDR1
NFWMN

SEQ ID NO: 21324 - protein, 19 aa, Artificial Sequence
  Description of Artificial Sequence: Synthetic peptide
  XENP019181 vhCDR2
EIRLYSNNYATHYAEPVKG

SEQ ID NO: 21325 - protein, 11 aa, Artificial Sequence
  Description of Artificial Sequence: Synthetic peptide
  XENP019181 vhCDR3
YYGNYGGYFDV

SEQ ID NO: 21326 - protein, 214 aa, Artificial Sequence; identical to SEQ ID NO: 21246
  Description of Artificial Sequence: Synthetic polypeptide
  XENP019181 1G6_H1.272_L1.191_IgG1_PVA_/S267K Light Chain

SEQ ID NO: 21327 - protein, 107 aa, Artificial Sequence; identical to SEQ ID NO: 15513
  Description of Artificial Sequence: Synthetic polypeptide
  VL of XENP019181

SEQ ID NO: 21328 - protein, 11 aa, Artificial Sequence
  Description of Artificial Sequence: Synthetic peptide
  XENP019181 vlCDR1
RASQSVGNDVA

SEQ ID NO: 21329 - protein, 7 aa, Artificial Sequence
  Description of Artificial Sequence: Synthetic peptide
  XENP019181 vlCDR2
YASHRYT

SEQ ID NO: 21330 - protein, 9 aa, Artificial Sequence
  Description of Artificial Sequence: Synthetic peptide
  XENP019181 vlCDR3
QQDWSSPRT

SEQ ID NO: 21331 - protein, 451 aa, Artificial Sequence; identical to SEQ ID NO: 16221
  Description of Artificial Sequence: Synthetic polypeptide
  XENP019193 1G6_H1_L1.188_IgG1_PVA_/S267K Heavy Chain

SEQ ID NO: 21332 - protein, 122 aa, Artificial Sequence; identical to SEQ ID NO: 10922
  Description of Artificial Sequence: Synthetic polypeptide
  VH of XENP019193

SEQ ID NO: 21333 - protein, 5 aa, Artificial Sequence
  Description of Artificial Sequence: Synthetic peptide
  XENP019193 vhCDR1
NYWMN

SEQ ID NO: 21334 - protein, 19 aa, Artificial Sequence
  Description of Artificial Sequence: Synthetic peptide
  XENP019193 vhCDR2
EIRLKSNNYATHYAEPVKG

SEQ ID NO: 21335 - protein, 11 aa, Artificial Sequence
  Description of Artificial Sequence: Synthetic peptide
  XENP019193 vhCDR3
YYGNYGGYFDV

SEQ ID NO: 21336 - protein, 214 aa, Artificial Sequence
  Description of Artificial Sequence: Synthetic polypeptide
  XENP019193 1G6_H1_L1.188_IgG1_PVA_/S267K Light Chain
EIVMTQSPATLSVSPGERVTLTCRASQSVGNDVAWYQQKPGQSPRLLINYASHRYTGVPDRFTGSGYGTEFTLTISSVQSEDFAVYFCQQDFSSPRTFGGGTKVEIKRTVAAPSVFIFPPSDEQLKSGTASVVCLLNNFYPREAKVQWKVDNALQSGNSQESVTEQDSKDSTYSLSSTLTLSKADYEKHKVYACEVTHQGLSSPVTKSFNRGEC

SEQ ID NO: 21337 - protein, 107 aa, Artificial Sequence; identical to SEQ ID NO: 15531
  Description of Artificial Sequence: Synthetic polypeptide
  VL of XENP019193

SEQ ID NO: 21338 - protein, 11 aa, Artificial Sequence
  Description of Artificial Sequence: Synthetic peptide
  XENP019193 vlCDR1
RASQSVGNDVA

SEQ ID NO: 21339 - protein, 7 aa, Artificial Sequence
  Description of Artificial Sequence: Synthetic peptide
  XENP019193 vlCDR2
YASHRYT

SEQ ID NO: 21340 - protein, 9 aa, Artificial Sequence
  Description of Artificial Sequence: Synthetic peptide
  XENP019193 vlCDR3
QQDFSSPRT

SEQ ID NO: 21341 - protein, 451 aa, Artificial Sequence; identical to SEQ ID NO: 16221
  Description of Artificial Sequence: Synthetic polypeptide
  XENP019194 1G6_H1_L1.189_IgG1_PVA_/S267K Heavy Chain

SEQ ID NO: 21342 - protein, 122 aa, Artificial Sequence; identical to SEQ ID NO: 10922
  Description of Artificial Sequence: Synthetic polypeptide
  VH of XENP019194

SEQ ID NO: 21343 - protein, 5 aa, Artificial Sequence
  Description of Artificial Sequence: Synthetic peptide
  XENP019194 vhCDR1
NYWMN

SEQ ID NO: 21344 - protein, 19 aa, Artificial Sequence
  Description of Artificial Sequence: Synthetic peptide
  XENP019194 vhCDR2
EIRLKSNNYATHYAEPVKG

SEQ ID NO: 21345 - protein, 11 aa, Artificial Sequence
  Description of Artificial Sequence: Synthetic peptide
  XENP019194 vhCDR3
YYGNYGGYFDV

SEQ ID NO: 21346 - protein, 214 aa, Artificial Sequence
  Description of Artificial Sequence: Synthetic polypeptide
  XENP019194 1G6_H1_L1.189_IgG1_PVA_/S267K Light Chain
EIVLTQSPATLSVSPGERVTLTCRASQSVGNDVAWYQQKPGQAPRLLINYASHRYTGVPDRFTGSGYGTEFTLTISSVQSEDFAVYYCQQDFSSPRTFGGGTKVEIKRTVAAPSVFIFPPSDEQLKSGTASVVCLLNNFYPREAKVQWKVDNALQSGNSQESVTEQDSKDSTYSLSSTLTLSKADYEKHKVYACEVTHQGLSSPVTKSFNRGEC

SEQ ID NO: 21347 - protein, 107 aa, Artificial Sequence; identical to SEQ ID NO: 15540
  Description of Artificial Sequence: Synthetic polypeptide
  VL of XENP019194

SEQ ID NO: 21348 - protein, 11 aa, Artificial Sequence
  Description of Artificial Sequence: Synthetic peptide
  XENP019194 vlCDR1
RASQSVGNDVA

SEQ ID NO: 21349 - protein, 7 aa, Artificial Sequence
  Description of Artificial Sequence: Synthetic peptide
  XENP019194 vlCDR2
YASHRYT

SEQ ID NO: 21350 - protein, 9 aa, Artificial Sequence
  Description of Artificial Sequence: Synthetic peptide
  XENP019194 vlCDR3
QQDFSSPRT

SEQ ID NO: 21351 - protein, 451 aa, Artificial Sequence
  Description of Artificial Sequence: Synthetic polypeptide
  XENP019195 1G6_H1.278_L1.188_IgG1_PVA_/S267K Heavy Chain
EVQLVESGGGLVKPGGSLRLSCVASGFTFSNYWMNWVRQAPGKGLEWVAEIRLYSNNYATHYAESVKGRFTISRDDSKSTLYLQMNNLKTEDTGVYYCTRYYGNYGGYFDVWGQGTLVTVSSASTKGPSVFPLAPSSKSTSGGTAALGCLVKDYFPEPVTVSWNSGALTSGVHTFPAVLQSSGLYSLSSVVTVPSSSLGTQTYICNVNHKPSNTKVDKKVEPKSCDKTHTCPPCPAPPVAGPSVFLFPPKPKDTLMISRTPEVTCVVVDVKHEDPEVKFNWYVDGVEVHNAKTKPREEQYNSTYRVVSVLTVLHQDWLNGKEYKCKVSNKALPAPIEKTISKAKGQPREPQVYTLPPSREEMTKNQVSLTCLVKGFYPSDIAVEWESNGQPENNYKTTPPVLDSDGSFFLYSKLTVDKSRWQQGNVFSCSVMHEALHNHYTQKSLSLSPGK

SEQ ID NO: 21352 - protein, 122 aa, Artificial Sequence; identical to SEQ ID NO: 15521
  Description of Artificial Sequence: Synthetic polypeptide
  VH of XENP019195

SEQ ID NO: 21353 - protein, 5 aa, Artificial Sequence
  Description of Artificial Sequence: Synthetic peptide
  XENP019195 vhCDR1
NYWMN

SEQ ID NO: 21354 - protein, 19 aa, Artificial Sequence
  Description of Artificial Sequence: Synthetic peptide
  XENP019195 vhCDR2
EIRLYSNNYATHYAESVKG

SEQ ID NO: 21355 - protein, 11 aa, Artificial Sequence
  Description of Artificial Sequence: Synthetic peptide
  XENP019195 vhCDR3
YYGNYGGYFDV

SEQ ID NO: 21356 - protein, 214 aa, Artificial Sequence; identical to SEQ ID NO: 21336
  Description of Artificial Sequence: Synthetic polypeptide
  XENP019195 1G6_H1.278_L1.188_IgG1_PVA_/S267K Light Chain

SEQ ID NO: 21357 - protein, 107 aa, Artificial Sequence; identical to SEQ ID NO: 15531
  Description of Artificial Sequence: Synthetic polypeptide
  VL of XENP019195

SEQ ID NO: 21358 - protein, 11 aa, Artificial Sequence
  Description of Artificial Sequence: Synthetic peptide
  XENP019195 vlCDR1
RASQSVGNDVA

SEQ ID NO: 21359 - protein, 7 aa, Artificial Sequence
  Description of Artificial Sequence: Synthetic peptide
  XENP019195 vlCDR2
YASHRYT

SEQ ID NO: 21360 - protein, 9 aa, Artificial Sequence
  Description of Artificial Sequence: Synthetic peptide
  XENP019195 vlCDR3
QQDFSSPRT

SEQ ID NO: 21361 - protein, 451 aa, Artificial Sequence; identical to SEQ ID NO: 21351
  Description of Artificial Sequence: Synthetic polypeptide
  XENP019196 1G6_H1.278_L1.189_IgG1_PVA_/S267K Heavy Chain

SEQ ID NO: 21362 - protein, 122 aa, Artificial Sequence; identical to SEQ ID NO: 15521
  Description of Artificial Sequence: Synthetic polypeptide
  VH of XENP019196

SEQ ID NO: 21363 - protein, 5 aa, Artificial Sequence
  Description of Artificial Sequence: Synthetic peptide
  XENP019196 vhCDR1
NYWMN

SEQ ID NO: 21364 - protein, 19 aa, Artificial Sequence
  Description of Artificial Sequence: Synthetic peptide
  XENP019196 vhCDR2
EIRLYSNNYATHYAESVKG

SEQ ID NO: 21365 - protein, 11 aa, Artificial Sequence
  Description of Artificial Sequence: Synthetic peptide
  XENP019196 vhCDR3
YYGNYGGYFDV

SEQ ID NO: 21366 - protein, 214 aa, Artificial Sequence; identical to SEQ ID NO: 21346
  Description of Artificial Sequence: Synthetic polypeptide
  XENP019196 1G6_H1.278_L1.189_IgG1_PVA_/S267K Light Chain

SEQ ID NO: 21367 - protein, 107 aa, Artificial Sequence; identical to SEQ ID NO: 15540
  Description of Artificial Sequence: Synthetic polypeptide
  VL of XENP019196

SEQ ID NO: 21368 - protein, 11 aa, Artificial Sequence
  Description of Artificial Sequence: Synthetic peptide
  XENP019196 vlCDR1
RASQSVGNDVA

SEQ ID NO: 21369 - protein, 7 aa, Artificial Sequence
  Description of Artificial Sequence: Synthetic peptide
  XENP019196 vlCDR2
YASHRYT

SEQ ID NO: 21370 - protein, 9 aa, Artificial Sequence
  Description of Artificial Sequence: Synthetic peptide
  XENP019196 vlCDR3
QQDFSSPRT

SEQ ID NO: 21371 - protein, 451 aa, Artificial Sequence; identical to SEQ ID NO: 21351
  Description of Artificial Sequence: Synthetic polypeptide
  XENP019201 1G6_H1.278_L1_IgG1_PVA_/S267K Heavy Chain

SEQ ID NO: 21372 - protein, 122 aa, Artificial Sequence; identical to SEQ ID NO: 15521
  Description of Artificial Sequence: Synthetic polypeptide
  VH of XENP019201

SEQ ID NO: 21373 - protein, 5 aa, Artificial Sequence
  Description of Artificial Sequence: Synthetic peptide
  XENP019201 vhCDR1
NYWMN

SEQ ID NO: 21374 - protein, 19 aa, Artificial Sequence
  Description of Artificial Sequence: Synthetic peptide
  XENP019201 vhCDR2
EIRLYSNNYATHYAESVKG

SEQ ID NO: 21375 - protein, 11 aa, Artificial Sequence
  Description of Artificial Sequence: Synthetic peptide
  XENP019201 vhCDR3
YYGNYGGYFDV

SEQ ID NO: 21376 - protein, 214 aa, Artificial Sequence; identical to SEQ ID NO: 16226
  Description of Artificial Sequence: Synthetic polypeptide
  XENP019201 1G6_H1.278_L1_IgG1_PVA_/S267K Light Chain

SEQ ID NO: 21377 - protein, 107 aa, Artificial Sequence; identical to SEQ ID NO: 10923
  Description of Artificial Sequence: Synthetic polypeptide
  VL of XENP019201

SEQ ID NO: 21378 - protein, 11 aa, Artificial Sequence
  Description of Artificial Sequence: Synthetic peptide
  XENP019201 vlCDR1
RASQSVSNDVA

SEQ ID NO: 21379 - protein, 7 aa, Artificial Sequence
  Description of Artificial Sequence: Synthetic peptide
  XENP019201 vlCDR2
YASHRYT

SEQ ID NO: 21380 - protein, 9 aa, Artificial Sequence
  Description of Artificial Sequence: Synthetic peptide
  XENP019201 vlCDR3
QQDYSSPRT

SEQ ID NO: 21381 - protein, 451 aa, Artificial Sequence
  Description of Artificial Sequence: Synthetic polypeptide
  XENP019589 1G6_H1.279_L1.189_IgG1_PVA_/S267K Heavy Chain
EVQLVESGGGLVKPGGSLRLSCVASGFTFSNYWMNWVRQAPGKGLEWVAEIRLYSNNYATHYAESVKGRFTISRDDSKSTLYLQMNNLKTEDTGVYYCTRYYGNYGGYFDVWGRGTLVTVSSASTKGPSVFPLAPSSKSTSGGTAALGCLVKDYFPEPVTVSWNSGALTSGVHTFPAVLQSSGLYSLSSVVTVPSSSLGTQTYICNVNHKPSNTKVDKKVEPKSCDKTHTCPPCPAPPVAGPSVFLFPPKPKDTLMISRTPEVTCVVVDVKHEDPEVKFNWYVDGVEVHNAKTKPREEQYNSTYRVVSVLTVLHQDWLNGKEYKCKVSNKALPAPIEKTISKAKGQPREPQVYTLPPSREEMTKNQVSLTCLVKGFYPSDIAVEWESNGQPENNYKTTPPVLDSDGSFFLYSKLTVDKSRWQQGNVFSCSVMHEALHNHYTQKSLSLSPGK

SEQ ID NO: 21382 - protein, 122 aa, Artificial Sequence; identical to SEQ ID NO: 2872
  Description of Artificial Sequence: Synthetic polypeptide
  VH of XENP019589

SEQ ID NO: 21383 - protein, 5 aa, Artificial Sequence
  Description of Artificial Sequence: Synthetic peptide
  XENP019589 vhCDR1
NYWMN

SEQ ID NO: 21384 - protein, 19 aa, Artificial Sequence
  Description of Artificial Sequence: Synthetic peptide
  XENP019589 vhCDR2
EIRLYSNNYATHYAESVKG

SEQ ID NO: 21385 - protein, 11 aa, Artificial Sequence
  Description of Artificial Sequence: Synthetic peptide
  XENP019589 vhCDR3
YYGNYGGYFDV

SEQ ID NO: 21386 - protein, 214 aa, Artificial Sequence; identical to SEQ ID NO: 21346
  Description of Artificial Sequence: Synthetic polypeptide
  XENP019589 1G6_H1.279_L1.189_IgG1_PVA_/S267K Light Chain

SEQ ID NO: 21387 - protein, 107 aa, Artificial Sequence; identical to SEQ ID NO: 15540
  Description of Artificial Sequence: Synthetic polypeptide
  VL of XENP019589

SEQ ID NO: 21388 - protein, 11 aa, Artificial Sequence
  Description of Artificial Sequence: Synthetic peptide
  XENP019589 vlCDR1
RASQSVGNDVA

SEQ ID NO: 21389 - protein, 7 aa, Artificial Sequence
  Description of Artificial Sequence: Synthetic peptide
  XENP019589 vlCDR2
YASHRYT

SEQ ID NO: 21390 - protein, 9 aa, Artificial Sequence
  Description of Artificial Sequence: Synthetic peptide
  XENP019589 vlCDR3
QQDFSSPRT

SEQ ID NO: 21391 - protein, 451 aa, Artificial Sequence
  Description of Artificial Sequence: Synthetic polypeptide
  XENP019590 1G6_H1.280_L1.189_IgG1_PVA_/S267K Heavy Chain
EVQLVESGGGLVKPGGSLRLTCVASGFTFSNYWMNWVRQAPGKGLEWVAEIRLYSNNYATHYAESVKGRFTISRDDSKSTLYLQMNNLKTEDTGVYYCTRYYGNYGGYFDVWGRGTLVTVSSASTKGPSVFPLAPSSKSTSGGTAALGCLVKDYFPEPVTVSWNSGALTSGVHTFPAVLQSSGLYSLSSVVTVPSSSLGTQTYICNVNHKPSNTKVDKKVEPKSCDKTHTCPPCPAPPVAGPSVFLFPPKPKDTLMISRTPEVTCVVVDVKHEDPEVKFNWYVDGVEVHNAKTKPREEQYNSTYRVVSVLTVLHQDWLNGKEYKCKVSNKALPAPIEKTISKAKGQPREPQVYTLPPSREEMTKNQVSLTCLVKGFYPSDIAVEWESNGQPENNYKTTPPVLDSDGSFFLYSKLTVDKSRWQQGNVFSCSVMHEALHNHYTQKSLSLSPGK

SEQ ID NO: 21392 - protein, 122 aa, Artificial Sequence; identical to SEQ ID NO: 15593
  Description of Artificial Sequence: Synthetic polypeptide
  VH of XENP019590

SEQ ID NO: 21393 - protein, 5 aa, Artificial Sequence
  Description of Artificial Sequence: Synthetic peptide
  XENP019590 vhCDR1
NYWMN

SEQ ID NO: 21394 - protein, 19 aa, Artificial Sequence
  Description of Artificial Sequence: Synthetic peptide
  XENP019590 vhCDR2
EIRLYSNNYATHYAESVKG

SEQ ID NO: 21395 - protein, 11 aa, Artificial Sequence
  Description of Artificial Sequence: Synthetic peptide
  XENP019590 vhCDR3
YYGNYGGYFDV

SEQ ID NO: 21396 - protein, 214 aa, Artificial Sequence; identical to SEQ ID NO: 21346
  Description of Artificial Sequence: Synthetic polypeptide
  XENP019590 1G6_H1.280_L1.189_IgG1_PVA_/S267K Light Chain

SEQ ID NO: 21397 - protein, 107 aa, Artificial Sequence; identical to SEQ ID NO: 15540
  Description of Artificial Sequence: Synthetic polypeptide
  VL of XENP019590

SEQ ID NO: 21398 - protein, 11 aa, Artificial Sequence
  Description of Artificial Sequence: Synthetic peptide
  XENP019590 vlCDR1
RASQSVGNDVA

SEQ ID NO: 21399 - protein, 7 aa, Artificial Sequence
  Description of Artificial Sequence: Synthetic peptide
  XENP019590 vlCDR2
YASHRYT

SEQ ID NO: 21400 - protein, 9 aa, Artificial Sequence
  Description of Artificial Sequence: Synthetic peptide
  XENP019590 vlCDR3
QQDFSSPRT

SEQ ID NO: 21401 - protein, 451 aa, Artificial Sequence
  Description of Artificial Sequence: Synthetic polypeptide
  XENP019591 1G6_H1.281_L1.189_IgG1_PVA_/S267K Heavy Chain
EVQLVESGGGLVKPGGSLRLSCVASGFTFSNYWMNWVRQAPGKGLEWVAEIRLYSNNYATHYAESVKGRFTISRDDSKSMLYLQMNNLKTEDTGVYYCTRYYGNYGGYFDVWGRGTLVTVSSASTKGPSVFPLAPSSKSTSGGTAALGCLVKDYFPEPVTVSWNSGALTSGVHTFPAVLQSSGLYSLSSVVTVPSSSLGTQTYICNVNHKPSNTKVDKKVEPKSCDKTHTCPPCPAPPVAGPSVFLFPPKPKDTLMISRTPEVTCVVVDVKHEDPEVKFNWYVDGVEVHNAKTKPREEQYNSTYRVVSVLTVLHQDWLNGKEYKCKVSNKALPAPIEKTISKAKGQPREPQVYTLPPSREEMTKNQVSLTCLVKGFYPSDIAVEWESNGQPENNYKTTPPVLDSDGSFFLYSKLTVDKSRWQQGNVFSCSVMHEALHNHYTQKSLSLSPGK

SEQ ID NO: 21402 - protein, 122 aa, Artificial Sequence; identical to SEQ ID NO: 15602
  Description of Artificial Sequence: Synthetic polypeptide
  VH of XENP019591

SEQ ID NO: 21403 - protein, 5 aa, Artificial Sequence
  Description of Artificial Sequence: Synthetic peptide
  XENP019591 vhCDR1
NYWMN

SEQ ID NO: 21404 - protein, 19 aa, Artificial Sequence
  Description of Artificial Sequence: Synthetic peptide
  XENP019591 vhCDR2
EIRLYSNNYATHYAESVKG

SEQ ID NO: 21405 - protein, 11 aa, Artificial Sequence
  Description of Artificial Sequence: Synthetic peptide
  XENP019591 vhCDR3
YYGNYGGYFDV

SEQ ID NO: 21406 - protein, 214 aa, Artificial Sequence; identical to SEQ ID NO: 21346
  Description of Artificial Sequence: Synthetic polypeptide
  XENP019591 1G6_H1.281_L1.189_IgG1_PVA_/S267K Light Chain

SEQ ID NO: 21407 - protein, 107 aa, Artificial Sequence; identical to SEQ ID NO: 15540
  Description of Artificial Sequence: Synthetic polypeptide
  VL of XENP019591

SEQ ID NO: 21408 - protein, 11 aa, Artificial Sequence
  Description of Artificial Sequence: Synthetic peptide
  XENP019591 vlCDR1
RASQSVGNDVA

SEQ ID NO: 21409 - protein, 7 aa, Artificial Sequence
  Description of Artificial Sequence: Synthetic peptide
  XENP019591 vlCDR2
YASHRYT

SEQ ID NO: 21410 - protein, 9 aa, Artificial Sequence
  Description of Artificial Sequence: Synthetic peptide
  XENP019591 vlCDR3
QQDFSSPRT

SEQ ID NO: 21411 - protein, 451 aa, Artificial Sequence
  Description of Artificial Sequence: Synthetic polypeptide
  XENP019592 1G6_H1.282_L1.189_IgG1_PVA_/S267K Heavy Chain
EVQLVESGGGLVKPGGSLRLTCVASGFTFSNYWMNWVRQAPGKGLEWVAEIRLYSNNYATHYAESVKGRFTISRDDSKSMLYLQMNNLKTEDTGVYYCTRYYGNYGGYFDVWGRGTLVTVSSASTKGPSVFPLAPSSKSTSGGTAALGCLVKDYFPEPVTVSWNSGALTSGVHTFPAVLQSSGLYSLSSVVTVPSSSLGTQTYICNVNHKPSNTKVDKKVEPKSCDKTHTCPPCPAPPVAGPSVFLFPPKPKDTLMISRTPEVTCVVVDVKHEDPEVKFNWYVDGVEVHNAKTKPREEQYNSTYRVVSVLTVLHQDWLNGKEYKCKVSNKALPAPIEKTISKAKGQPREPQVYTLPPSREEMTKNQVSLTCLVKGFYPSDIAVEWESNGQPENNYKTTPPVLDSDGSFFLYSKLTVDKSRWQQGNVFSCSVMHEALHNHYTQKSLSLSPGK

SEQ ID NO: 21412 - protein, 122 aa, Artificial Sequence; identical to SEQ ID NO: 15611
  Description of Artificial Sequence: Synthetic polypeptide
  VH of XENP019592

SEQ ID NO: 21413 - protein, 5 aa, Artificial Sequence
  Description of Artificial Sequence: Synthetic peptide
  XENP019592 vhCDR1
NYWMN

SEQ ID NO: 21414 - protein, 19 aa, Artificial Sequence
  Description of Artificial Sequence: Synthetic peptide
  XENP019592 vhCDR2
EIRLYSNNYATHYAESVKG

SEQ ID NO: 21415 - protein, 11 aa, Artificial Sequence
  Description of Artificial Sequence: Synthetic peptide
  XENP019592 vhCDR3
YYGNYGGYFDV

SEQ ID NO: 21416 - protein, 214 aa, Artificial Sequence; identical to SEQ ID NO: 21346
  Description of Artificial Sequence: Synthetic polypeptide
  XENP019592 1G6_H1.282_L1.189_IgG1_PVA_/S267K Light Chain

SEQ ID NO: 21417 - protein, 107 aa, Artificial Sequence; identical to SEQ ID NO: 15540
  Description of Artificial Sequence: Synthetic polypeptide
  VL of XENP019592

SEQ ID NO: 21418 - protein, 11 aa, Artificial Sequence
  Description of Artificial Sequence: Synthetic peptide
  XENP019592 vlCDR1
RASQSVGNDVA

SEQ ID NO: 21419 - protein, 7 aa, Artificial Sequence
  Description of Artificial Sequence: Synthetic peptide
  XENP019592 vlCDR2
YASHRYT

SEQ ID NO: 21420 - protein, 9 aa, Artificial Sequence
  Description of Artificial Sequence: Synthetic peptide
  XENP019592 vlCDR3
QQDFSSPRT

SEQ ID NO: 21421 - protein, 451 aa, Artificial Sequence
  Description of Artificial Sequence: Synthetic polypeptide
  XENP019593 1G6_H1.283_L1.189_IgG1_PVA_/S267K Heavy Chain
EVQLVESGGGLVKPGGSLRLSCVASGFTFSNYWMNWVRQAPGKGLEWVCEIRLYSNNYATHYAESVKGRFTCSRDDSKSTLYLQMNNLKTEDTGVYYCTRYYGNYGGYFDVWGQGTLVTVSSASTKGPSVFPLAPSSKSTSGGTAALGCLVKDYFPEPVTVSWNSGALTSGVHTFPAVLQSSGLYSLSSVVTVPSSSLGTQTYICNVNHKPSNTKVDKKVEPKSCDKTHTCPPCPAPPVAGPSVFLFPPKPKDTLMISRTPEVTCVVVDVKHEDPEVKFNWYVDGVEVHNAKTKPREEQYNSTYRVVSVLTVLHQDWLNGKEYKCKVSNKALPAPIEKTISKAKGQPREPQVYTLPPSREEMTKNQVSLTCLVKGFYPSDIAVEWESNGQPENNYKTTPPVLDSDGSFFLYSKLTVDKSRWQQGNVFSCSVMHEALHNHYTQKSLSLSPGK

SEQ ID NO: 21422 - protein, 122 aa, Artificial Sequence; identical to SEQ ID NO: 15620
  Description of Artificial Sequence: Synthetic polypeptide
  VH of XENP019593

SEQ ID NO: 21423 - protein, 5 aa, Artificial Sequence
  Description of Artificial Sequence: Synthetic peptide
  XENP019593 vhCDR1
NYWMN

SEQ ID NO: 21424 - protein, 19 aa, Artificial Sequence
  Description of Artificial Sequence: Synthetic peptide
  XENP019593 vhCDR2
EIRLYSNNYATHYAESVKG

SEQ ID NO: 21425 - protein, 11 aa, Artificial Sequence
  Description of Artificial Sequence: Synthetic peptide
  XENP019593 vhCDR3
YYGNYGGYFDV

SEQ ID NO: 21426 - protein, 214 aa, Artificial Sequence; identical to SEQ ID NO: 21346
  Description of Artificial Sequence: Synthetic polypeptide
  XENP019593 1G6_H1.283_L1.189_IgG1_PVA_/S267K Light Chain

SEQ ID NO: 21427 - protein, 107 aa, Artificial Sequence; identical to SEQ ID NO: 15540
  Description of Artificial Sequence: Synthetic polypeptide
  VL of XENP019593

SEQ ID NO: 21428 - protein, 11 aa, Artificial Sequence
  Description of Artificial Sequence: Synthetic peptide
  XENP019593 vlCDR1
RASQSVGNDVA

SEQ ID NO: 21429 - protein, 7 aa, Artificial Sequence
  Description of Artificial Sequence: Synthetic peptide
  XENP019593 vlCDR2
YASHRYT

SEQ ID NO: 21430 - protein, 9 aa, Artificial Sequence
  Description of Artificial Sequence: Synthetic peptide
  XENP019593 vlCDR3
QQDFSSPRT

SEQ ID NO: 21431 - protein, 451 aa, Artificial Sequence
  Description of Artificial Sequence: Synthetic polypeptide
  XENP019594 1G6_H1.284_L1.189_IgG1_PVA_/S267K Heavy Chain
EVQLVESGGGLVKPGGSLRLSCVASGFTFSNYWMNWVRQAPGKGLEWVCEIRLYSNNYATHYAESVKGRFTCSRDDSKSTLYLQMNNLKTEDTGVYYCTRYYGNYGGYFDVWGRGTLVTVSSASTKGPSVFPLAPSSKSTSGGTAALGCLVKDYFPEPVTVSWNSGALTSGVHTFPAVLQSSGLYSLSSVVTVPSSSLGTQTYICNVNHKPSNTKVDKKVEPKSCDKTHTCPPCPAPPVAGPSVFLFPPKPKDTLMISRTPEVTCVVVDVKHEDPEVKFNWYVDGVEVHNAKTKPREEQYNSTYRVVSVLTVLHQDWLNGKEYKCKVSNKALPAPIEKTISKAKGQPREPQVYTLPPSREEMTKNQVSLTCLVKGFYPSDIAVEWESNGQPENNYKTTPPVLDSDGSFFLYSKLTVDKSRWQQGNVFSCSVMHEALHNHYTQKSLSLSPGK

SEQ ID NO: 21432 - protein, 122 aa, Artificial Sequence; identical to SEQ ID NO: 15629
  Description of Artificial Sequence: Synthetic polypeptide
  VH of XENP019594

SEQ ID NO: 21433 - protein, 5 aa, Artificial Sequence
  Description of Artificial Sequence: Synthetic peptide
  XENP019594 vhCDR1
NYWMN

SEQ ID NO: 21434 - protein, 19 aa, Artificial Sequence
  Description of Artificial Sequence: Synthetic peptide
  XENP019594 vhCDR2
EIRLYSNNYATHYAESVKG

SEQ ID NO: 21435 - protein, 11 aa, Artificial Sequence
  Description of Artificial Sequence: Synthetic peptide
  XENP019594 vhCDR3
YYGNYGGYFDV

SEQ ID NO: 21436 - protein, 214 aa, Artificial Sequence; identical to SEQ ID NO: 21346
  Description of Artificial Sequence: Synthetic polypeptide
  XENP019594 1G6_H1.284_L1.189_IgG1_PVA_/S267K Light Chain

SEQ ID NO: 21437 - protein, 107 aa, Artificial Sequence; identical to SEQ ID NO: 15540
  Description of Artificial Sequence: Synthetic polypeptide
  VL of XENP019594

SEQ ID NO: 21438 - protein, 11 aa, Artificial Sequence
  Description of Artificial Sequence: Synthetic peptide
  XENP019594 vlCDR1
RASQSVGNDVA

SEQ ID NO: 21439 - protein, 7 aa, Artificial Sequence
  Description of Artificial Sequence: Synthetic peptide
  XENP019594 vlCDR2
YASHRYT

SEQ ID NO: 21440 - protein, 9 aa, Artificial Sequence
  Description of Artificial Sequence: Synthetic peptide
  XENP019594 vlCDR3
QQDFSSPRT

SEQ ID NO: 21441 - protein, 451 aa, Artificial Sequence
  Description of Artificial Sequence: Synthetic polypeptide
  XENP019595 1G6_H1.285_L1.189_IgG1_PVA_/S267K Heavy Chain
EVQLVESGGGLVKPGGSLRLTCVASGFTFSNYWMNWVRQAPGKGLEWVCEIRLYSNNYATHYAESVKGRFTCSRDDSKSMLYLQMNNLKTEDTGVYYCTRYYGNYGGYFDVWGRGTLVTVSSASTKGPSVFPLAPSSKSTSGGTAALGCLVKDYFPEPVTVSWNSGALTSGVHTFPAVLQSSGLYSLSSVVTVPSSSLGTQTYICNVNHKPSNTKVDKKVEPKSCDKTHTCPPCPAPPVAGPSVFLFPPKPKDTLMISRTPEVTCVVVDVKHEDPEVKFNWYVDGVEVHNAKTKPREEQYNSTYRVVSVLTVLHQDWLNGKEYKCKVSNKALPAPIEKTISKAKGQPREPQVYTLPPSREEMTKNQVSLTCLVKGFYPSDIAVEWESNGQPENNYKTTPPVLDSDGSFFLYSKLTVDKSRWQQGNVFSCSVMHEALHNHYTQKSLSLSPGK

SEQ ID NO: 21442 - protein, 122 aa, Artificial Sequence; identical to SEQ ID NO: 15638
  Description of Artificial Sequence: Synthetic polypeptide
  VH of XENP019595

SEQ ID NO: 21443 - protein, 5 aa, Artificial Sequence
  Description of Artificial Sequence: Synthetic peptide
  XENP019595 vhCDR1
NYWMN

SEQ ID NO: 21444 - protein, 19 aa, Artificial Sequence
  Description of Artificial Sequence: Synthetic peptide
  XENP019595 vhCDR2
EIRLYSNNYATHYAESVKG

SEQ ID NO: 21445 - protein, 11 aa, Artificial Sequence
  Description of Artificial Sequence: Synthetic peptide
  XENP019595 vhCDR3
YYGNYGGYFDV

SEQ ID NO: 21446 - protein, 214 aa, Artificial Sequence; identical to SEQ ID NO: 21346
  Description of Artificial Sequence: Synthetic polypeptide
  XENP019595 1G6_H1.285_L1.189_IgG1_PVA_/S267K Light Chain

SEQ ID NO: 21447 - protein, 107 aa, Artificial Sequence; identical to SEQ ID NO: 15540
  Description of Artificial Sequence: Synthetic polypeptide
  VL of XENP019595

SEQ ID NO: 21448 - protein, 11 aa, Artificial Sequence
  Description of Artificial Sequence: Synthetic peptide
  XENP019595 vlCDR1
RASQSVGNDVA

SEQ ID NO: 21449 - protein, 7 aa, Artificial Sequence
  Description of Artificial Sequence: Synthetic peptide
  XENP019595 vlCDR2
YASHRYT

SEQ ID NO: 21450 - protein, 9 aa, Artificial Sequence
  Description of Artificial Sequence: Synthetic peptide
  XENP019595 vlCDR3
QQDFSSPRT

SEQ ID NO: 21451 - protein, 451 aa, Artificial Sequence
  Description of Artificial Sequence: Synthetic polypeptide
  XENP019596 1G6_H1.286_L1.189_IgG1_PVA_/S267K Heavy Chain
EVQLVESGGGLVKPGGSLRLSCVASGFTFSNYWMNWVRQAPGKGLEWVAEIRLYSDNYATHYAESVKGRFTISRDDSKSTLYLQMNNLKTEDTGVYYCTRYYGNYGGYFDVWGQGTLVTVSSASTKGPSVFPLAPSSKSTSGGTAALGCLVKDYFPEPVTVSWNSGALTSGVHTFPAVLQSSGLYSLSSVVTVPSSSLGTQTYICNVNHKPSNTKVDKKVEPKSCDKTHTCPPCPAPPVAGPSVFLFPPKPKDTLMISRTPEVTCVVVDVKHEDPEVKFNWYVDGVEVHNAKTKPREEQYNSTYRVVSVLTVLHQDWLNGKEYKCKVSNKALPAPIEKTISKAKGQPREPQVYTLPPSREEMTKNQVSLTCLVKGFYPSDIAVEWESNGQPENNYKTTPPVLDSDGSFFLYSKLTVDKSRWQQGNVFSCSVMHEALHNHYTQKSLSLSPGK

SEQ ID NO: 21452 - protein, 122 aa, Artificial Sequence; identical to SEQ ID NO: 15647
  Description of Artificial Sequence: Synthetic polypeptide
  VH of XENP019596

SEQ ID NO: 21453 - protein, 5 aa, Artificial Sequence
  Description of Artificial Sequence: Synthetic peptide
  XENP019596 vhCDR1
NYWMN

SEQ ID NO: 21454 - protein, 19 aa, Artificial Sequence
  Description of Artificial Sequence: Synthetic peptide
  XENP019596 vhCDR2
EIRLYSDNYATHYAESVKG

SEQ ID NO: 21455 - protein, 11 aa, Artificial Sequence
  Description of Artificial Sequence: Synthetic peptide
  XENP019596 vhCDR3
YYGNYGGYFDV

SEQ ID NO: 21456 - protein, 214 aa, Artificial Sequence; identical to SEQ ID NO: 21346
  Description of Artificial Sequence: Synthetic polypeptide
  XENP019596 1G6_H1.286_L1.189_IgG1_PVA_/S267K Light Chain

SEQ ID NO: 21457 - protein, 107 aa, Artificial Sequence; identical to SEQ ID NO: 15540
  Description of Artificial Sequence: Synthetic polypeptide
  VL of XENP019596

SEQ ID NO: 21458 - protein, 11 aa, Artificial Sequence
  Description of Artificial Sequence: Synthetic peptide
  XENP019596 vlCDR1
RASQSVGNDVA

SEQ ID NO: 21459 - protein, 7 aa, Artificial Sequence
  Description of Artificial Sequence: Synthetic peptide
  XENP019596 vlCDR2
YASHRYT

SEQ ID NO: 21460 - protein, 9 aa, Artificial Sequence
  Description of Artificial Sequence: Synthetic peptide
  XENP019596 vlCDR3
QQDFSSPRT

SEQ ID NO: 21461 - protein, 451 aa, Artificial Sequence; identical to SEQ ID NO: 21351
  Description of Artificial Sequence: Synthetic polypeptide
  XENP019601 1G6_H1.278_L1.192_IgG1_PVA_/S267K Heavy Chain

SEQ ID NO: 21462 - protein, 122 aa, Artificial Sequence; identical to SEQ ID NO: 15521
  Description of Artificial Sequence: Synthetic polypeptide
  VH of XENP019601

SEQ ID NO: 21463 - protein, 5 aa, Artificial Sequence
  Description of Artificial Sequence: Synthetic peptide
  XENP019601 vhCDR1
NYWMN

SEQ ID NO: 21464 - protein, 19 aa, Artificial Sequence
  Description of Artificial Sequence: Synthetic peptide
  XENP019601 vhCDR2
EIRLYSNNYATHYAESVKG

SEQ ID NO: 21465 - protein, 11 aa, Artificial Sequence
  Description of Artificial Sequence: Synthetic peptide
  XENP019601 vhCDR3
YYGNYGGYFDV

SEQ ID NO: 21466 - protein, 214 aa, Artificial Sequence
  Description of Artificial Sequence: Synthetic polypeptide
  XENP019601 1G6_H1.278_L1.192_IgG1_PVA_/S267K Light Chain
EIVLTQSPATLSASPGERVTLTCRASQSVGNDVAWYQQKPGQAPRLLINYASHRYTGVPDRFTGSGYGTEFTLTISSVQSEDFAVYYCQQDFSSPRTFGGGTKVEIKRTVAAPSVFIFPPSDEQLKSGTASVVCLLNNFYPREAKVQWKVDNALQSGNSQESVTEQDSKDSTYSLSSTLTLSKADYEKHKVYACEVTHQGLSSPVTKSFNRGEC

SEQ ID NO: 21467 - protein, 107 aa, Artificial Sequence; identical to SEQ ID NO: 15657
  Description of Artificial Sequence: Synthetic polypeptide
  VL of XENP019601

SEQ ID NO: 21468 - protein, 11 aa, Artificial Sequence
  Description of Artificial Sequence: Synthetic peptide
  XENP019601 vlCDR1
RASQSVGNDVA

SEQ ID NO: 21469 - protein, 7 aa, Artificial Sequence
  Description of Artificial Sequence: Synthetic peptide
  XENP019601 vlCDR2
YASHRYT

SEQ ID NO: 21470 - protein, 9 aa, Artificial Sequence
  Description of Artificial Sequence: Synthetic peptide
  XENP019601 vlCDR3
QQDFSSPRT

SEQ ID NO: 21471 - protein, 451 aa, Artificial Sequence; identical to SEQ ID NO: 21351
  Description of Artificial Sequence: Synthetic polypeptide
  XENP019602 1G6_H1.278_L1.193_IgG1_PVA_/S267K Heavy Chain

SEQ ID NO: 21472 - protein, 122 aa, Artificial Sequence; identical to SEQ ID NO: 15521
  Description of Artificial Sequence: Synthetic polypeptide
  VH of XENP019602

SEQ ID NO: 21473 - protein, 5 aa, Artificial Sequence
  Description of Artificial Sequence: Synthetic peptide
  XENP019602 vhCDR1
NYWMN

SEQ ID NO: 21474 - protein, 19 aa, Artificial Sequence
  Description of Artificial Sequence: Synthetic peptide
  XENP019602 vhCDR2
EIRLYSNNYATHYAESVKG

SEQ ID NO: 21475 - protein, 11 aa, Artificial Sequence
  Description of Artificial Sequence: Synthetic peptide
  XENP019602 vhCDR3
YYGNYGGYFDV

SEQ ID NO: 21476 - protein, 214 aa, Artificial Sequence
  Description of Artificial Sequence: Synthetic polypeptide
  XENP019602 1G6_H1.278_L1.193_IgG1_PVA_/S267K Light Chain
EIVLTQSPATLSVSPGERVTLTCRASQSVGNDVAWYQQKPGQAPRLLINYASHRYTGVPDRFTGSGYGTEFTLTISSVQSEDFGVYYCQQDFSSPRTFGGGTKVEIKRTVAAPSVFIFPPSDEQLKSGTASVVCLLNNFYPREAKVQWKVDNALQSGNSQESVTEQDSKDSTYSLSSTLTLSKADYEKHKVYACEVTHQGLSSPVTKSFNRGEC

SEQ ID NO: 21477 - protein, 107 aa, Artificial Sequence; identical to SEQ ID NO: 15666
  Description of Artificial Sequence: Synthetic polypeptide
  VL of XENP019602

SEQ ID NO: 21478 - protein, 11 aa, Artificial Sequence
  Description of Artificial Sequence: Synthetic peptide
  XENP019602 vlCDR1
RASQSVGNDVA

SEQ ID NO: 21479 - protein, 7 aa, Artificial Sequence
  Description of Artificial Sequence: Synthetic peptide
  XENP019602 vlCDR2
YASHRYT

SEQ ID NO: 21480 - protein, 9 aa, Artificial Sequence
  Description of Artificial Sequence: Synthetic peptide
  XENP019602 vlCDR3
QQDFSSPRT

SEQ ID NO: 21481 - protein, 451 aa, Artificial Sequence; identical to SEQ ID NO: 21351
  Description of Artificial Sequence: Synthetic polypeptide
  XENP019603 1G6_H1.278_L1.194_IgG1_PVA_/S267K Heavy Chain

SEQ ID NO: 21482 - protein, 122 aa, Artificial Sequence; identical to SEQ ID NO: 15521
  Description of Artificial Sequence: Synthetic polypeptide
  VH of XENP019603

SEQ ID NO: 21483 - protein, 5 aa, Artificial Sequence
  Description of Artificial Sequence: Synthetic peptide
  XENP019603 vhCDR1
NYWMN

SEQ ID NO: 21484 - protein, 19 aa, Artificial Sequence
  Description of Artificial Sequence: Synthetic peptide
  XENP019603 vhCDR2
EIRLYSNNYATHYAESVKG

SEQ ID NO: 21485 - protein, 11 aa, Artificial Sequence
  Description of Artificial Sequence: Synthetic peptide
  XENP019603 vhCDR3
YYGNYGGYFDV

SEQ ID NO: 21486 - protein, 214 aa, Artificial Sequence
  Description of Artificial Sequence: Synthetic polypeptide
  XENP019603 1G6_H1.278_L1.194_IgG1_PVA_/S267K Light Chain
EIVLTQSPATLSASPGERVTLTCRASQSVGNDVAWYQQKPGQAPRLLINYASHRYTGVPDRFTGSGYGTEFTLTISSVQSEDFGVYYCQQDFSSPRTFGGGTKVEIKRTVAAPSVFIFPPSDEQLKSGTASVVCLLNNFYPREAKVQWKVDNALQSGNSQESVTEQDSKDSTYSLSSTLTLSKADYEKHKVYACEVTHQGLSSPVTKSFNRGEC

SEQ ID NO: 21487 - protein, 107 aa, Artificial Sequence; identical to SEQ ID NO: 2871
  Description of Artificial Sequence: Synthetic polypeptide
  VL of XENP019603

SEQ ID NO: 21488 - protein, 11 aa, Artificial Sequence
  Description of Artificial Sequence: Synthetic peptide
  XENP019603 vlCDR1
RASQSVGNDVA

SEQ ID NO: 21489 - protein, 7 aa, Artificial Sequence
  Description of Artificial Sequence: Synthetic peptide
  XENP019603 vlCDR2
YASHRYT

SEQ ID NO: 21490 - protein, 9 aa, Artificial Sequence
  Description of Artificial Sequence: Synthetic peptide
  XENP019603 vlCDR3
QQDFSSPRT

SEQ ID NO: 21491 - protein, 451 aa, Artificial Sequence; identical to SEQ ID NO: 21351
  Description of Artificial Sequence: Synthetic polypeptide
  XENP019604 1G6_H1.278_L1.195_IgG1_PVA_/S267K Heavy Chain

SEQ ID NO: 21492 - protein, 122 aa, Artificial Sequence; identical to SEQ ID NO: 15521
  Description of Artificial Sequence: Synthetic polypeptide
  VH of XENP019604

SEQ ID NO: 21493 - protein, 5 aa, Artificial Sequence
  Description of Artificial Sequence: Synthetic peptide
  XENP019604 vhCDR1
NYWMN

SEQ ID NO: 21494 - protein, 19 aa, Artificial Sequence
  Description of Artificial Sequence: Synthetic peptide
  XENP019604 vhCDR2
EIRLYSNNYATHYAESVKG

SEQ ID NO: 21495 - protein, 11 aa, Artificial Sequence
  Description of Artificial Sequence: Synthetic peptide
  XENP019604 vhCDR3
YYGNYGGYFDV

SEQ ID NO: 21496 - protein, 214 aa, Artificial Sequence
  Description of Artificial Sequence: Synthetic polypeptide
  XENP019604 1G6_H1.278_L1.195_IgG1_PVA_/S267K Light Chain
EIVLTQSPATLSVSPGERVTLTCRASQSVGNDVAWYQQKPGQAPRLLCNYASHRYTGVPDRFTCSGYGTEFTLTISSVQSEDFAVYYCQQDFSSPRTFGGGTKVEIKRTVAAPSVFIFPPSDEQLKSGTASVVCLLNNFYPREAKVQWKVDNALQSGNSQESVTEQDSKDSTYSLSSTLTLSKADYEKHKVYACEVTHQGLSSPVTKSFNRGEC

SEQ ID NO: 21497 - protein, 107 aa, Artificial Sequence; identical to SEQ ID NO: 15684
  Description of Artificial Sequence: Synthetic polypeptide
  VL of XENP019604

SEQ ID NO: 21498 - protein, 11 aa, Artificial Sequence
  Description of Artificial Sequence: Synthetic peptide
  XENP019604 vlCDR1
RASQSVGNDVA

SEQ ID NO: 21499 - protein, 7 aa, Artificial Sequence
  Description of Artificial Sequence: Synthetic peptide
  XENP019604 vlCDR2
YASHRYT

SEQ ID NO: 21500 - protein, 9 aa, Artificial Sequence
  Description of Artificial Sequence: Synthetic peptide
  XENP019604 vlCDR3
QQDFSSPRT

SEQ ID NO: 21501 - protein, 451 aa, Artificial Sequence; identical to SEQ ID NO: 21351
  Description of Artificial Sequence: Synthetic polypeptide
  XENP019605 1G6_H1.278_L1.196_IgG1_PVA_/S267K Heavy Chain

SEQ ID NO: 21502 - protein, 122 aa, Artificial Sequence; identical to SEQ ID NO: 15521
  Description of Artificial Sequence: Synthetic polypeptide
  VH of XENP019605

SEQ ID NO: 21503 - protein, 5 aa, Artificial Sequence
  Description of Artificial Sequence: Synthetic peptide
  XENP019605 vhCDR1
NYWMN

SEQ ID NO: 21504 - protein, 19 aa, Artificial Sequence
  Description of Artificial Sequence: Synthetic peptide
  XENP019605 vhCDR2
EIRLYSNNYATHYAESVKG

SEQ ID NO: 21505 - protein, 11 aa, Artificial Sequence
  Description of Artificial Sequence: Synthetic peptide
  XENP019605 vhCDR3
YYGNYGGYFDV

SEQ ID NO: 21506 - protein, 214 aa, Artificial Sequence
  Description of Artificial Sequence: Synthetic polypeptide
  XENP019605 1G6_H1.278_L1.196_IgG1_PVA_/S267K Light Chain
EIVLTQSPATLSASPGERVTLTCRASQSVGNDVAWYQQKPGQAPRLLCNYASHRYTGVPDRFTCSGYGTEFTLTISSVQSEDFGVYYCQQDFSSPRTFGGGTKVEIKRTVAAPSVFIFPPSDEQLKSGTASVVCLLNNFYPREAKVQWKVDNALQSGNSQESVTEQDSKDSTYSLSSTLTLSKADYEKHKVYACEVTHQGLSSPVTKSFNRGEC

SEQ ID NO: 21507 - protein, 107 aa, Artificial Sequence; identical to SEQ ID NO: 15693
  Description of Artificial Sequence: Synthetic polypeptide
  VL of XENP019605

SEQ ID NO: 21508 - protein, 11 aa, Artificial Sequence
  Description of Artificial Sequence: Synthetic peptide
  XENP019605 vlCDR1
RASQSVGNDVA

SEQ ID NO: 21509 - protein, 7 aa, Artificial Sequence
  Description of Artificial Sequence: Synthetic peptide
  XENP019605 vlCDR2
YASHRYT

SEQ ID NO: 21510 - protein, 9 aa, Artificial Sequence
  Description of Artificial Sequence: Synthetic peptide
  XENP019605 vlCDR3
QQDFSSPRT

SEQ ID NO: 21511 - protein, 451 aa, Artificial Sequence; identical to SEQ ID NO: 21351
  Description of Artificial Sequence: Synthetic polypeptide
  XENP019606 1G6_H1.278_L1.197_IgG1_PVA_/S267K Heavy Chain

SEQ ID NO: 21512 - protein, 122 aa, Artificial Sequence; identical to SEQ ID NO: 15521
  Description of Artificial Sequence: Synthetic polypeptide
  VH of XENP019606

SEQ ID NO: 21513 - protein, 5 aa, Artificial Sequence
  Description of Artificial Sequence: Synthetic peptide
  XENP019606 vhCDR1
NYWMN

SEQ ID NO: 21514 - protein, 19 aa, Artificial Sequence
  Description of Artificial Sequence: Synthetic peptide
  XENP019606 vhCDR2
EIRLYSNNYATHYAESVKG

SEQ ID NO: 21515 - protein, 11 aa, Artificial Sequence
  Description of Artificial Sequence: Synthetic peptide
  XENP019606 vhCDR3
YYGNYGGYFDV

SEQ ID NO: 21516 - protein, 214 aa, Artificial Sequence
  Description of Artificial Sequence: Synthetic polypeptide
  XENP019606 1G6_H1.278_L1.197_IgG1_PVA_/S267K Light Chain
EIVLTQSPATLSASPGERVTLTCRASQSVGNDVAWYQQKPGQAPRLLCNYASHRYTSVPDRFTCSGYGTEFTLTISSVQSEDFGVYYCQQDFSSPRTFGGGTKVEIKRTVAAPSVFIFPPSDEQLKSGTASVVCLLNNFYPREAKVQWKVDNALQSGNSQESVTEQDSKDSTYSLSSTLTLSKADYEKHKVYACEVTHQGLSSPVTKSFNRGEC

SEQ ID NO: 21517 - protein, 107 aa, Artificial Sequence; identical to SEQ ID NO: 15702
  Description of Artificial Sequence: Synthetic polypeptide
  VL of XENP019606

SEQ ID NO: 21518 - protein, 11 aa, Artificial Sequence
  Description of Artificial Sequence: Synthetic peptide
  XENP019606 vlCDR1
RASQSVGNDVA

SEQ ID NO: 21519 - protein, 7 aa, Artificial Sequence
  Description of Artificial Sequence: Synthetic peptide
  XENP019606 vlCDR2
YASHRYT

SEQ ID NO: 21520 - protein, 9 aa, Artificial Sequence
  Description of Artificial Sequence: Synthetic peptide
  XENP019606 vlCDR3
QQDFSSPRT

SEQ ID NO: 21521 - protein, 451 aa, Artificial Sequence; identical to SEQ ID NO: 21351
  Description of Artificial Sequence: Synthetic polypeptide
  XENP019607 1G6_H1.278_L1.198_IgG1_PVA_/S267K Heavy Chain

SEQ ID NO: 21522 - protein, 122 aa, Artificial Sequence; identical to SEQ ID NO: 15521
  Description of Artificial Sequence: Synthetic polypeptide
  VH of XENP019607

SEQ ID NO: 21523 - protein, 5 aa, Artificial Sequence
  Description of Artificial Sequence: Synthetic peptide
  XENP019607 vhCDR1
NYWMN

SEQ ID NO: 21524 - protein, 19 aa, Artificial Sequence
  Description of Artificial Sequence: Synthetic peptide
  XENP019607 vhCDR2
EIRLYSNNYATHYAESVKG

SEQ ID NO: 21525 - protein, 11 aa, Artificial Sequence
  Description of Artificial Sequence: Synthetic peptide
  XENP019607 vhCDR3
YYGNYGGYFDV

SEQ ID NO: 21526 - protein, 214 aa, Artificial Sequence
  Description of Artificial Sequence: Synthetic polypeptide
  XENP019607 1G6_H1.278_L1.198_IgG1_PVA_/S267K Light Chain
EIVLTQSPSTLSVSPGERVTLTCRASQSVGNDVAWYQQKPGQAPRLLINYASHRYTGVPDRFTGSGYGTEFTLTISSVQSEDFAVYYCQQDFSSPRTFGGGTKVEIKRTVAAPSVFIFPPSDEQLKSGTASVVCLLNNFYPREAKVQWKVDNALQSGNSQESVTEQDSKDSTYSLSSTLTLSKADYEKHKVYACEVTHQGLSSPVTKSFNRGEC

SEQ ID NO: 21527 - protein, 107 aa, Artificial Sequence; identical to SEQ ID NO: 15711
  Description of Artificial Sequence: Synthetic polypeptide
  VL of XENP019607

SEQ ID NO: 21528 - protein, 11 aa, Artificial Sequence
  Description of Artificial Sequence: Synthetic peptide
  XENP019607 vlCDR1
RASQSVGNDVA

SEQ ID NO: 21529 - protein, 7 aa, Artificial Sequence
  Description of Artificial Sequence: Synthetic peptide
  XENP019607 vlCDR2
YASHRYT

SEQ ID NO: 21530 - protein, 9 aa, Artificial Sequence
  Description of Artificial Sequence: Synthetic peptide
  XENP019607 vlCDR3
QQDFSSPRT

SEQ ID NO: 21531 - protein, 451 aa, Artificial Sequence; identical to SEQ ID NO: 21351
  Description of Artificial Sequence: Synthetic polypeptide
  XENP019608 1G6_H1.278_L1.199_IgG1_PVA_/S267K Heavy Chain

SEQ ID NO: 21532 - protein, 122 aa, Artificial Sequence; identical to SEQ ID NO: 15521
  Description of Artificial Sequence: Synthetic polypeptide
  VH of XENP019608

SEQ ID NO: 21533 - protein, 5 aa, Artificial Sequence
  Description of Artificial Sequence: Synthetic peptide
  XENP019608 vhCDR1
NYWMN

SEQ ID NO: 21534 - protein, 19 aa, Artificial Sequence
  Description of Artificial Sequence: Synthetic peptide
  XENP019608 vhCDR2
EIRLYSNNYATHYAESVKG

SEQ ID NO: 21535 - protein, 11 aa, Artificial Sequence
  Description of Artificial Sequence: Synthetic peptide
  XENP019608 vhCDR3
YYGNYGGYFDV

SEQ ID NO: 21536 - protein, 214 aa, Artificial Sequence
  Description of Artificial Sequence: Synthetic polypeptide
  XENP019608 1G6_H1.278_L1.199_IgG1_PVA_/S267K Light Chain
EIVLTQSPDTLSVSPGERVTLTCRASQSVGNDVAWYQQKPGQAPRLLINYASHRYTGVPDRFTGSGYGTEFTLTISSVQSEDFAVYYCQQDFSSPRTFGGGTKVEIKRTVAAPSVFIFPPSDEQLKSGTASVVCLLNNFYPREAKVQWKVDNALQSGNSQESVTEQDSKDSTYSLSSTLTLSKADYEKHKVYACEVTHQGLSSPVTKSFNRGEC

SEQ ID NO: 21537 - protein, 107 aa, Artificial Sequence; identical to SEQ ID NO: 15720
  Description of Artificial Sequence: Synthetic polypeptide
  VL of XENP019608

SEQ ID NO: 21538 - protein, 11 aa, Artificial Sequence
  Description of Artificial Sequence: Synthetic peptide
  XENP019608 vlCDR1
RASQSVGNDVA

SEQ ID NO: 21539 - protein, 7 aa, Artificial Sequence
  Description of Artificial Sequence: Synthetic peptide
  XENP019608 vlCDR2
YASHRYT

SEQ ID NO: 21540 - protein, 9 aa, Artificial Sequence
  Description of Artificial Sequence: Synthetic peptide
  XENP019608 vlCDR3
QQDFSSPRT

SEQ ID NO: 21541 - protein, 451 aa, Artificial Sequence; identical to SEQ ID NO: 21351
  Description of Artificial Sequence: Synthetic polypeptide
  XENP019609 1G6_H1.278_L1.200_IgG1_PVA_/S267K Heavy Chain

SEQ ID NO: 21542 - protein, 122 aa, Artificial Sequence; identical to SEQ ID NO: 15521
  Description of Artificial Sequence: Synthetic polypeptide
  VH of XENP019609

SEQ ID NO: 21543 - protein, 5 aa, Artificial Sequence
  Description of Artificial Sequence: Synthetic peptide
  XENP019609 vhCDR1
NYWMN

SEQ ID NO: 21544 - protein, 19 aa, Artificial Sequence
  Description of Artificial Sequence: Synthetic peptide
  XENP019609 vhCDR2
EIRLYSNNYATHYAESVKG

SEQ ID NO: 21545 - protein, 11 aa, Artificial Sequence
  Description of Artificial Sequence: Synthetic peptide
  XENP019609 vhCDR3
YYGNYGGYFDV

SEQ ID NO: 21546 - protein, 214 aa, Artificial Sequence
  Description of Artificial Sequence: Synthetic polypeptide
  XENP019609 1G6_H1.278_L1.200_IgG1_PVA_/S267K Light Chain
EIVLTQSPATLAVSPGERVTLTCRASQSVGNDVAWYQQKPGQAPRLLINYASHRYTGVPDRFTGSGYGTEFTLTISSVQSEDFAVYYCQQDFSSPRTFGGGTKVEIKRTVAAPSVFIFPPSDEQLKSGTASVVCLLNNFYPREAKVQWKVDNALQSGNSQESVTEQDSKDSTYSLSSTLTLSKADYEKHKVYACEVTHQGLSSPVTKSFNRGEC

SEQ ID NO: 21547 - protein, 107 aa, Artificial Sequence; identical to SEQ ID NO: 15729
  Description of Artificial Sequence: Synthetic polypeptide
  VL of XENP019609

SEQ ID NO: 21548 - protein, 11 aa, Artificial Sequence
  Description of Artificial Sequence: Synthetic peptide
  XENP019609 vlCDR1
RASQSVGNDVA

SEQ ID NO: 21549 - protein, 7 aa, Artificial Sequence
  Description of Artificial Sequence: Synthetic peptide
  XENP019609 vlCDR2
YASHRYT

SEQ ID NO: 21550 - protein, 9 aa, Artificial Sequence
  Description of Artificial Sequence: Synthetic peptide
  XENP019609 vlCDR3
QQDFSSPRT

SEQ ID NO: 21551 - protein, 451 aa, Artificial Sequence; identical to SEQ ID NO: 21351
  Description of Artificial Sequence: Synthetic polypeptide
  XENP019610 1G6_H1.278_L1.201_IgG1_PVA_/S267K Heavy Chain

SEQ ID NO: 21552 - protein, 122 aa, Artificial Sequence; identical to SEQ ID NO: 15521
  Description of Artificial Sequence: Synthetic polypeptide
  VH of XENP019610

SEQ ID NO: 21553 - protein, 5 aa, Artificial Sequence
  Description of Artificial Sequence: Synthetic peptide
  XENP019610 vhCDR1
NYWMN

SEQ ID NO: 21554 - protein, 19 aa, Artificial Sequence
  Description of Artificial Sequence: Synthetic peptide
  XENP019610 vhCDR2
EIRLYSNNYATHYAESVKG

SEQ ID NO: 21555 - protein, 11 aa, Artificial Sequence
  Description of Artificial Sequence: Synthetic peptide
  XENP019610 vhCDR3
YYGNYGGYFDV

SEQ ID NO: 21556 - protein, 214 aa, Artificial Sequence; identical to SEQ ID NO: 21466
  Description of Artificial Sequence: Synthetic polypeptide
  XENP019610 1G6_H1.278_L1.201_IgG1_PVA_/S267K Light Chain

SEQ ID NO: 21557 - protein, 107 aa, Artificial Sequence; identical to SEQ ID NO: 15657
  Description of Artificial Sequence: Synthetic polypeptide
  VL of XENP019610

SEQ ID NO: 21558 - protein, 11 aa, Artificial Sequence
  Description of Artificial Sequence: Synthetic peptide
  XENP019610 vlCDR1
RASQSVGNDVA

SEQ ID NO: 21559 - protein, 7 aa, Artificial Sequence
  Description of Artificial Sequence: Synthetic peptide
  XENP019610 vlCDR2
YASHRYT

SEQ ID NO: 21560 - protein, 9 aa, Artificial Sequence
  Description of Artificial Sequence: Synthetic peptide
  XENP019610 vlCDR3
QQDFSSPRT

SEQ ID NO: 21561 - protein, 451 aa, Artificial Sequence; identical to SEQ ID NO: 21351
  Description of Artificial Sequence: Synthetic polypeptide
  XENP019611 1G6_H1.278_L1.202_IgG1_PVA_/S267K Heavy Chain

SEQ ID NO: 21562 - protein, 122 aa, Artificial Sequence; identical to SEQ ID NO: 15521
  Description of Artificial Sequence: Synthetic polypeptide
  VH of XENP019611

SEQ ID NO: 21563 - protein, 5 aa, Artificial Sequence
  Description of Artificial Sequence: Synthetic peptide
  XENP019611 vhCDR1
NYWMN

SEQ ID NO: 21564 - protein, 19 aa, Artificial Sequence
  Description of Artificial Sequence: Synthetic peptide
  XENP019611 vhCDR2
EIRLYSNNYATHYAESVKG

SEQ ID NO: 21565 - protein, 11 aa, Artificial Sequence
  Description of Artificial Sequence: Synthetic peptide
  XENP019611 vhCDR3
YYGNYGGYFDV

SEQ ID NO: 21566 - protein, 214 aa, Artificial Sequence
  Description of Artificial Sequence: Synthetic polypeptide
  XENP019611 1G6_H1.278_L1.202_IgG1_PVA_/S267K Light Chain
EIVLTQSPATLSVSVGERVTLTCRASQSVGNDVAWYQQKPGQAPRLLINYASHRYTGVPDRFTGSGYGTEFTLTISSVQSEDFAVYYCQQDFSSPRTFGGGTKVEIKRTVAAPSVFIFPPSDEQLKSGTASVVCLLNNFYPREAKVQWKVDNALQSGNSQESVTEQDSKDSTYSLSSTLTLSKADYEKHKVYACEVTHQGLSSPVTKSFNRGEC

SEQ ID NO: 21567 - protein, 107 aa, Artificial Sequence; identical to SEQ ID NO: 15747
  Description of Artificial Sequence: Synthetic polypeptide
  VL of XENP019611

SEQ ID NO: 21568 - protein, 11 aa, Artificial Sequence
  Description of Artificial Sequence: Synthetic peptide
  XENP019611 vlCDR1
RASQSVGNDVA

SEQ ID NO: 21569 - protein, 7 aa, Artificial Sequence
  Description of Artificial Sequence: Synthetic peptide
  XENP019611 vlCDR2
YASHRYT

SEQ ID NO: 21570 - protein, 9 aa, Artificial Sequence
  Description of Artificial Sequence: Synthetic peptide
  XENP019611 vlCDR3
QQDFSSPRT

SEQ ID NO: 21571 - protein, 451 aa, Artificial Sequence; identical to SEQ ID NO: 21351
  Description of Artificial Sequence: Synthetic polypeptide
  XENP019612 1G6_H1.278_L1.203_IgG1_PVA_/S267K Heavy Chain

SEQ ID NO: 21572 - protein, 122 aa, Artificial Sequence; identical to SEQ ID NO: 15521
  Description of Artificial Sequence: Synthetic polypeptide
  VH of XENP019612

SEQ ID NO: 21573 - protein, 5 aa, Artificial Sequence
  Description of Artificial Sequence: Synthetic peptide
  XENP019612 vhCDR1
NYWMN

SEQ ID NO: 21574 - protein, 19 aa, Artificial Sequence
  Description of Artificial Sequence: Synthetic peptide
  XENP019612 vhCDR2
EIRLYSNNYATHYAESVKG

SEQ ID NO: 21575 - protein, 11 aa, Artificial Sequence
  Description of Artificial Sequence: Synthetic peptide
  XENP019612 vhCDR3
YYGNYGGYFDV

SEQ ID NO: 21576 - protein, 214 aa, Artificial Sequence
  Description of Artificial Sequence: Synthetic polypeptide
  XENP019612 1G6_H1.278_L1.203_IgG1_PVA_/S267K Light Chain
EIVLTQSPATLSVSLGERVTLTCRASQSVGNDVAWYQQKPGQAPRLLINYASHRYTGVPDRFTGSGYGTEFTLTISSVQSEDFAVYYCQQDFSSPRTFGGGTKVEIKRTVAAPSVFIFPPSDEQLKSGTASVVCLLNNFYPREAKVQWKVDNALQSGNSQESVTEQDSKDSTYSLSSTLTLSKADYEKHKVYACEVTHQGLSSPVTKSFNRGEC

SEQ ID NO: 21577 - protein, 107 aa, Artificial Sequence; identical to SEQ ID NO: 15756
  Description of Artificial Sequence: Synthetic polypeptide
  VL of XENP019612

SEQ ID NO: 21578 - protein, 11 aa, Artificial Sequence
  Description of Artificial Sequence: Synthetic peptide
  XENP019612 vlCDR1
RASQSVGNDVA

SEQ ID NO: 21579 - protein, 7 aa, Artificial Sequence
  Description of Artificial Sequence: Synthetic peptide
  XENP019612 vlCDR2
YASHRYT

SEQ ID NO: 21580 - protein, 9 aa, Artificial Sequence
  Description of Artificial Sequence: Synthetic peptide
  XENP019612 vlCDR3
QQDFSSPRT

SEQ ID NO: 21581 - protein, 451 aa, Artificial Sequence; identical to SEQ ID NO: 21351
  Description of Artificial Sequence: Synthetic polypeptide
  XENP019613 1G6_H1.278_L1.204_IgG1_PVA_/S267K Heavy Chain

SEQ ID NO: 21582 - protein, 122 aa, Artificial Sequence; identical to SEQ ID NO: 15521
  Description of Artificial Sequence: Synthetic polypeptide
  VH of XENP019613

SEQ ID NO: 21583 - protein, 5 aa, Artificial Sequence
  Description of Artificial Sequence: Synthetic peptide
  XENP019613 vhCDR1
NYWMN

SEQ ID NO: 21584 - protein, 19 aa, Artificial Sequence
  Description of Artificial Sequence: Synthetic peptide
  XENP019613 vhCDR2
EIRLYSNNYATHYAESVKG

SEQ ID NO: 21585 - protein, 11 aa, Artificial Sequence
  Description of Artificial Sequence: Synthetic peptide
  XENP019613 vhCDR3
YYGNYGGYFDV

SEQ ID NO: 21586 - protein, 214 aa, Artificial Sequence
  Description of Artificial Sequence: Synthetic polypeptide
  XENP019613 1G6_H1.278_L1.204_IgG1_PVA_/S267K Light Chain
EIVLTQSPATLSVSPGERVTLNCRASQSVGNDVAWYQQKPGQAPRLLINYASHRYTGVPDRFTGSGYGTEFTLTISSVQSEDFAVYYCQQDFSSPRTFGGGTKVEIKRTVAAPSVFIFPPSDEQLKSGTASVVCLLNNFYPREAKVQWKVDNALQSGNSQESVTEQDSKDSTYSLSSTLTLSKADYEKHKVYACEVTHQGLSSPVTKSFNRGEC

SEQ ID NO: 21587 - protein, 107 aa, Artificial Sequence; identical to SEQ ID NO: 15765
  Description of Artificial Sequence: Synthetic polypeptide
  VL of XENP019613

SEQ ID NO: 21588 - protein, 11 aa, Artificial Sequence
  Description of Artificial Sequence: Synthetic peptide
  XENP019613 vlCDR1
RASQSVGNDVA

SEQ ID NO: 21589 - protein, 7 aa, Artificial Sequence
  Description of Artificial Sequence: Synthetic peptide
  XENP019613 vlCDR2
YASHRYT

SEQ ID NO: 21590 - protein, 9 aa, Artificial Sequence
  Description of Artificial Sequence: Synthetic peptide
  XENP019613 vlCDR3
QQDFSSPRT

SEQ ID NO: 21591 - protein, 451 aa, Artificial Sequence; identical to SEQ ID NO: 21351
  Description of Artificial Sequence: Synthetic polypeptide
  XENP019614 1G6_H1.278_L1.205_IgG1_PVA_/S267K Heavy Chain

SEQ ID NO: 21592 - protein, 122 aa, Artificial Sequence; identical to SEQ ID NO: 15521
  Description of Artificial Sequence: Synthetic polypeptide
  VH of XENP019614

SEQ ID NO: 21593 - protein, 5 aa, Artificial Sequence
  Description of Artificial Sequence: Synthetic peptide
  XENP019614 vhCDR1
NYWMN

SEQ ID NO: 21594 - protein, 19 aa, Artificial Sequence
  Description of Artificial Sequence: Synthetic peptide
  XENP019614 vhCDR2
EIRLYSNNYATHYAESVKG

SEQ ID NO: 21595 - protein, 11 aa, Artificial Sequence
  Description of Artificial Sequence: Synthetic peptide
  XENP019614 vhCDR3
YYGNYGGYFDV

SEQ ID NO: 21596 - protein, 214 aa, Artificial Sequence
  Description of Artificial Sequence: Synthetic polypeptide
  XENP019614 1G6_H1.278_L1.205_IgG1_PVA_/S267K Light Chain
EIVLTQSPATLSVSPGERVTLTCRASQSVGNDVAWYQQKPGKAPRLLINYASHRYTGVPDRFTGSGYGTEFTLTISSVQSEDFAVYYCQQDFSSPRTFGGGTKVEIKRTVAAPSVFIFPPSDEQLKSGTASVVCLLNNFYPREAKVQWKVDNALQSGNSQESVTEQDSKDSTYSLSSTLTLSKADYEKHKVYACEVTHQGLSSPVTKSFNRGEC

SEQ ID NO: 21597 - protein, 107 aa, Artificial Sequence; identical to SEQ ID NO: 15774
  Description of Artificial Sequence: Synthetic polypeptide
  VL of XENP019614

SEQ ID NO: 21598 - protein, 11 aa, Artificial Sequence
  Description of Artificial Sequence: Synthetic peptide
  XENP019614 vlCDR1
RASQSVGNDVA

SEQ ID NO: 21599 - protein, 7 aa, Artificial Sequence
  Description of Artificial Sequence: Synthetic peptide
  XENP019614 vlCDR2
YASHRYT

SEQ ID NO: 21600 - protein, 9 aa, Artificial Sequence
  Description of Artificial Sequence: Synthetic peptide
  XENP019614 vlCDR3
QQDFSSPRT

SEQ ID NO: 21601 - protein, 451 aa, Artificial Sequence; identical to SEQ ID NO: 21351
  Description of Artificial Sequence: Synthetic polypeptide
  XENP019615 1G6_H1.278_L1.206_IgG1_PVA_/S267K Heavy Chain

SEQ ID NO: 21602 - protein, 122 aa, Artificial Sequence; identical to SEQ ID NO: 15521
  Description of Artificial Sequence: Synthetic polypeptide
  VH of XENP019615

SEQ ID NO: 21603 - protein, 5 aa, Artificial Sequence
  Description of Artificial Sequence: Synthetic peptide
  XENP019615 vhCDR1
NYWMN

SEQ ID NO: 21604 - protein, 19 aa, Artificial Sequence
  Description of Artificial Sequence: Synthetic peptide
  XENP019615 vhCDR2
EIRLYSNNYATHYAESVKG

SEQ ID NO: 21605 - protein, 11 aa, Artificial Sequence
  Description of Artificial Sequence: Synthetic peptide
  XENP019615 vhCDR3
YYGNYGGYFDV

SEQ ID NO: 21606 - protein, 214 aa, Artificial Sequence
  Description of Artificial Sequence: Synthetic polypeptide
  XENP019615 1G6_H1.278_L1.206_IgG1_PVA_/S267K Light Chain
EIVLTQSPATLSVSPGERVTLTCRASQSVGNDVAWYQQKPGQAPRLLINYASHRYTGVPDRFTGSGYGTEFTLTISSVQPEDFAVYYCQQDFSSPRTFGGGTKVEIKRTVAAPSVFIFPPSDEQLKSGTASVVCLLNNFYPREAKVQWKVDNALQSGNSQESVTEQDSKDSTYSLSSTLTLSKADYEKHKVYACEVTHQGLSSPVTKSFNRGEC

SEQ ID NO: 21607 - protein, 107 aa, Artificial Sequence; identical to SEQ ID NO: 15783
  Description of Artificial Sequence: Synthetic polypeptide
  VL of XENP019615

SEQ ID NO: 21608 - protein, 11 aa, Artificial Sequence
  Description of Artificial Sequence: Synthetic peptide
  XENP019615 vlCDR1
RASQSVGNDVA

SEQ ID NO: 21609 - protein, 7 aa, Artificial Sequence
  Description of Artificial Sequence: Synthetic peptide
  XENP019615 vlCDR2
YASHRYT

SEQ ID NO: 21610 - protein, 9 aa, Artificial Sequence
  Description of Artificial Sequence: Synthetic peptide
  XENP019615 vlCDR3
QQDFSSPRT

SEQ ID NO: 21611 - protein, 451 aa, Artificial Sequence; identical to SEQ ID NO: 21351
  Description of Artificial Sequence: Synthetic polypeptide
  XENP019616 1G6_H1.278_L1.207_IgG1_PVA_/S267K Heavy Chain

SEQ ID NO: 21612 - protein, 122 aa, Artificial Sequence; identical to SEQ ID NO: 15521
  Description of Artificial Sequence: Synthetic polypeptide
  VH of XENP019616

SEQ ID NO: 21613 - protein, 5 aa, Artificial Sequence
  Description of Artificial Sequence: Synthetic peptide
  XENP019616 vhCDR1
NYWMN

SEQ ID NO: 21614 - protein, 19 aa, Artificial Sequence
  Description of Artificial Sequence: Synthetic peptide
  XENP019616 vhCDR2
EIRLYSNNYATHYAESVKG

SEQ ID NO: 21615 - protein, 11 aa, Artificial Sequence
  Description of Artificial Sequence: Synthetic peptide
  XENP019616 vhCDR3
YYGNYGGYFDV

SEQ ID NO: 21616 - protein, 214 aa, Artificial Sequence
  Description of Artificial Sequence: Synthetic polypeptide
  XENP019616 1G6_H1.278_L1.207_IgG1_PVA_/S267K Light Chain
EIVLTQSPATLSVSPGERVTLTCRASQSVGNDVAWYQQKPGQAPRLLINYASHRYTGVPDRFTGSGYGTEFTLTISSVQSEDVAVYYCQQDFSSPRTFGGGTKVEIKRTVAAPSVFIFPPSDEQLKSGTASVVCLLNNFYPREAKVQWKVDNALQSGNSQESVTEQDSKDSTYSLSSTLTLSKADYEKHKVYACEVTHQGLSSPVTKSFNRGEC

SEQ ID NO: 21617 - protein, 107 aa, Artificial Sequence; identical to SEQ ID NO: 15792
  Description of Artificial Sequence: Synthetic polypeptide
  VL of XENP019616

SEQ ID NO: 21618 - protein, 11 aa, Artificial Sequence
  Description of Artificial Sequence: Synthetic peptide
  XENP019616 vlCDR1
RASQSVGNDVA

SEQ ID NO: 21619 - protein, 7 aa, Artificial Sequence
  Description of Artificial Sequence: Synthetic peptide
  XENP019616 vlCDR2
YASHRYT

SEQ ID NO: 21620 - protein, 9 aa, Artificial Sequence
  Description of Artificial Sequence: Synthetic peptide
  XENP019616 vlCDR3
QQDFSSPRT

SEQ ID NO: 21621 - protein, 451 aa, Artificial Sequence; identical to SEQ ID NO: 21351
  Description of Artificial Sequence: Synthetic polypeptide
  XENP019617 1G6_H1.278_L1.208_IgG1_PVA_/S267K Heavy Chain

SEQ ID NO: 21622 - protein, 122 aa, Artificial Sequence; identical to SEQ ID NO: 15521
  Description of Artificial Sequence: Synthetic polypeptide
  VH of XENP019617

SEQ ID NO: 21623 - protein, 5 aa, Artificial Sequence
  Description of Artificial Sequence: Synthetic peptide
  XENP019617 vhCDR1
NYWMN

SEQ ID NO: 21624 - protein, 19 aa, Artificial Sequence
  Description of Artificial Sequence: Synthetic peptide
  XENP019617 vhCDR2
EIRLYSNNYATHYAESVKG

SEQ ID NO: 21625 - protein, 11 aa, Artificial Sequence
  Description of Artificial Sequence: Synthetic peptide
  XENP019617 vhCDR3
YYGNYGGYFDV

SEQ ID NO: 21626 - protein, 214 aa, Artificial Sequence
  Description of Artificial Sequence: Synthetic polypeptide
  XENP019617 1G6_H1.278_L1.208_IgG1_PVA_/S267K Light Chain
EIVLTQSPATLSVSPGERVTLTCRASQSVGNDVAWYQQKPGQAPRLLINYASHRYTGVPDRFTGSGYGTEFTLTISSVQSEDFATYYCQQDFSSPRTFGGGTKVEIKRTVAAPSVFIFPPSDEQLKSGTASVVCLLNNFYPREAKVQWKVDNALQSGNSQESVTEQDSKDSTYSLSSTLTLSKADYEKHKVYACEVTHQGLSSPVTKSFNRGEC

SEQ ID NO: 21627 - protein, 107 aa, Artificial Sequence; identical to SEQ ID NO: 15801
  Description of Artificial Sequence: Synthetic polypeptide
  VL of XENP019617

SEQ ID NO: 21628 - protein, 11 aa, Artificial Sequence
  Description of Artificial Sequence: Synthetic peptide
  XENP019617 vlCDR1
RASQSVGNDVA

SEQ ID NO: 21629 - protein, 7 aa, Artificial Sequence
  Description of Artificial Sequence: Synthetic peptide
  XENP019617 vlCDR2
YASHRYT

SEQ ID NO: 21630 - protein, 9 aa, Artificial Sequence
  Description of Artificial Sequence: Synthetic peptide
  XENP019617 vlCDR3
QQDFSSPRT

SEQ ID NO: 21631 - protein, 451 aa, Artificial Sequence; identical to SEQ ID NO: 21381
  Description of Artificial Sequence: Synthetic polypeptide
  XENP019678 1G6_H1.279_L1.192_IgG1_PVA_/S267K Heavy Chain

SEQ ID NO: 21632 - protein, 122 aa, Artificial Sequence; identical to SEQ ID NO: 2872
  Description of Artificial Sequence: Synthetic polypeptide
  VH of XENP019678

SEQ ID NO: 21633 - protein, 5 aa, Artificial Sequence
  Description of Artificial Sequence: Synthetic peptide
  XENP019678 vhCDR1
NYWMN

SEQ ID NO: 21634 - protein, 19 aa, Artificial Sequence
  Description of Artificial Sequence: Synthetic peptide
  XENP019678 vhCDR2
EIRLYSNNYATHYAESVKG

SEQ ID NO: 21635 - protein, 11 aa, Artificial Sequence
  Description of Artificial Sequence: Synthetic peptide
  XENP019678 vhCDR3
YYGNYGGYFDV

SEQ ID NO: 21636 - protein, 214 aa, Artificial Sequence; identical to SEQ ID NO: 21466
  Description of Artificial Sequence: Synthetic polypeptide
  XENP019678 1G6_H1.279_L1.192_IgG1_PVA_/S267K Light Chain

SEQ ID NO: 21637 - protein, 107 aa, Artificial Sequence; identical to SEQ ID NO: 15657
  Description of Artificial Sequence: Synthetic polypeptide
  VL of XENP019678

SEQ ID NO: 21638 - protein, 11 aa, Artificial Sequence
  Description of Artificial Sequence: Synthetic peptide
  XENP019678 vlCDR1
RASQSVGNDVA

SEQ ID NO: 21639 - protein, 7 aa, Artificial Sequence
  Description of Artificial Sequence: Synthetic peptide
  XENP019678 vlCDR2
YASHRYT

SEQ ID NO: 21640 - protein, 9 aa, Artificial Sequence
  Description of Artificial Sequence: Synthetic peptide
  XENP019678 vlCDR3
QQDFSSPRT

SEQ ID NO: 21641 - protein, 451 aa, Artificial Sequence; identical to SEQ ID NO: 21391
  Description of Artificial Sequence: Synthetic polypeptide
  XENP019679 1G6_H1.280_L1.192_IgG1_PVA_/S267K Heavy Chain

SEQ ID NO: 21642 - protein, 122 aa, Artificial Sequence; identical to SEQ ID NO: 15593
  Description of Artificial Sequence: Synthetic polypeptide
  VH of XENP019679

SEQ ID NO: 21643 - protein, 5 aa, Artificial Sequence
  Description of Artificial Sequence: Synthetic peptide
  XENP019679 vhCDR1
NYWMN

SEQ ID NO: 21644 - protein, 19 aa, Artificial Sequence
  Description of Artificial Sequence: Synthetic peptide
  XENP019679 vhCDR2
EIRLYSNNYATHYAESVKG

SEQ ID NO: 21645 - protein, 11 aa, Artificial Sequence
  Description of Artificial Sequence: Synthetic peptide
  XENP019679 vhCDR3
YYGNYGGYFDV

SEQ ID NO: 21646 - protein, 214 aa, Artificial Sequence; identical to SEQ ID NO: 21466
  Description of Artificial Sequence: Synthetic polypeptide
  XENP019679 1G6_H1.280_L1.192_IgG1_PVA_/S267K Light Chain

SEQ ID NO: 21647 - protein, 107 aa, Artificial Sequence; identical to SEQ ID NO: 15657
  Description of Artificial Sequence: Synthetic polypeptide
  VL of XENP019679

SEQ ID NO: 21648 - protein, 11 aa, Artificial Sequence
  Description of Artificial Sequence: Synthetic peptide
  XENP019679 vlCDR1
RASQSVGNDVA

SEQ ID NO: 21649 - protein, 7 aa, Artificial Sequence
  Description of Artificial Sequence: Synthetic peptide
  XENP019679 vlCDR2
YASHRYT

SEQ ID NO: 21650 - protein, 9 aa, Artificial Sequence
  Description of Artificial Sequence: Synthetic peptide
  XENP019679 vlCDR3
QQDFSSPRT

SEQ ID NO: 21651 - protein, 451 aa, Artificial Sequence; identical to SEQ ID NO: 21401
  Description of Artificial Sequence: Synthetic polypeptide
  XENP019680 1G6_H1.281_L1.192_IgG1_PVA_/S267K Heavy Chain

SEQ ID NO: 21652 - protein, 122 aa, Artificial Sequence; identical to SEQ ID NO: 15602
  Description of Artificial Sequence: Synthetic polypeptide
  VH of XENP019680

SEQ ID NO: 21653 - protein, 5 aa, Artificial Sequence
  Description of Artificial Sequence: Synthetic peptide
  XENP019680 vhCDR1
NYWMN

SEQ ID NO: 21654 - protein, 19 aa, Artificial Sequence
  Description of Artificial Sequence: Synthetic peptide
  XENP019680 vhCDR2
EIRLYSNNYATHYAESVKG

SEQ ID NO: 21655 - protein, 11 aa, Artificial Sequence
  Description of Artificial Sequence: Synthetic peptide
  XENP019680 vhCDR3
YYGNYGGYFDV

SEQ ID NO: 21656 - protein, 214 aa, Artificial Sequence; identical to SEQ ID NO: 21466
  Description of Artificial Sequence: Synthetic polypeptide
  XENP019680 1G6_H1.281_L1.192_IgG1_PVA_/S267K Light Chain

SEQ ID NO: 21657 - protein, 107 aa, Artificial Sequence; identical to SEQ ID NO: 15657
  Description of Artificial Sequence: Synthetic polypeptide
  VL of XENP019680

SEQ ID NO: 21658 - protein, 11 aa, Artificial Sequence
  Description of Artificial Sequence: Synthetic peptide
  XENP019680 vlCDR1
RASQSVGNDVA

SEQ ID NO: 21659 - protein, 7 aa, Artificial Sequence
  Description of Artificial Sequence: Synthetic peptide
  XENP019680 vlCDR2
YASHRYT

SEQ ID NO: 21660 - protein, 9 aa, Artificial Sequence
  Description of Artificial Sequence: Synthetic peptide
  XENP019680 vlCDR3
QQDFSSPRT

SEQ ID NO: 21661 - protein, 451 aa, Artificial Sequence; identical to SEQ ID NO: 21411
  Description of Artificial Sequence: Synthetic polypeptide
  XENP019681 1G6_H1.282_L1.192_IgG1_PVA_/S267K Heavy Chain

SEQ ID NO: 21662 - protein, 122 aa, Artificial Sequence; identical to SEQ ID NO: 15611
  Description of Artificial Sequence: Synthetic polypeptide
  VH of XENP019681

SEQ ID NO: 21663 - protein, 5 aa, Artificial Sequence
  Description of Artificial Sequence: Synthetic peptide
  XENP019681 vhCDR1
NYWMN

SEQ ID NO: 21664 - protein, 19 aa, Artificial Sequence
  Description of Artificial Sequence: Synthetic peptide
  XENP019681 vhCDR2
EIRLYSNNYATHYAESVKG

SEQ ID NO: 21665 - protein, 11 aa, Artificial Sequence
  Description of Artificial Sequence: Synthetic peptide
  XENP019681 vhCDR3
YYGNYGGYFDV

SEQ ID NO: 21666 - protein, 214 aa, Artificial Sequence; identical to SEQ ID NO: 21466
  Description of Artificial Sequence: Synthetic polypeptide
  XENP019681 1G6_H1.282_L1.192_IgG1_PVA_/S267K Light Chain

SEQ ID NO: 21667 - protein, 107 aa, Artificial Sequence; identical to SEQ ID NO: 15657
  Description of Artificial Sequence: Synthetic polypeptide
  VL of XENP019681

SEQ ID NO: 21668 - protein, 11 aa, Artificial Sequence
  Description of Artificial Sequence: Synthetic peptide
  XENP019681 vlCDR1
RASQSVGNDVA

SEQ ID NO: 21669 - protein, 7 aa, Artificial Sequence
  Description of Artificial Sequence: Synthetic peptide
  XENP019681 vlCDR2
YASHRYT

SEQ ID NO: 21670 - protein, 9 aa, Artificial Sequence
  Description of Artificial Sequence: Synthetic peptide
  XENP019681 vlCDR3
QQDFSSPRT

SEQ ID NO: 21671 - protein, 451 aa, Artificial Sequence; identical to SEQ ID NO: 21381
  Description of Artificial Sequence: Synthetic polypeptide
  XENP019682 1G6_H1.279_L1.193_IgG1_PVA_/S267K Heavy Chain

SEQ ID NO: 21672 - protein, 122 aa, Artificial Sequence; identical to SEQ ID NO: 2872
  Description of Artificial Sequence: Synthetic polypeptide
  VH of XENP019682

SEQ ID NO: 21673 - protein, 5 aa, Artificial Sequence
  Description of Artificial Sequence: Synthetic peptide
  XENP019682 vhCDR1
NYWMN

SEQ ID NO: 21674 - protein, 19 aa, Artificial Sequence
  Description of Artificial Sequence: Synthetic peptide
  XENP019682 vhCDR2
EIRLYSNNYATHYAESVKG

SEQ ID NO: 21675 - protein, 11 aa, Artificial Sequence
  Description of Artificial Sequence: Synthetic peptide
  XENP019682 vhCDR3
YYGNYGGYFDV

SEQ ID NO: 21676 - protein, 214 aa, Artificial Sequence; identical to SEQ ID NO: 21476
  Description of Artificial Sequence: Synthetic polypeptide
  XENP019682 1G6_H1.279_L1.193_IgG1_PVA_/S267K Light Chain

SEQ ID NO: 21677 - protein, 107 aa, Artificial Sequence; identical to SEQ ID NO: 15666
  Description of Artificial Sequence: Synthetic polypeptide
  VL of XENP019682

SEQ ID NO: 21678 - protein, 11 aa, Artificial Sequence
  Description of Artificial Sequence: Synthetic peptide
  XENP019682 vlCDR1
RASQSVGNDVA

SEQ ID NO: 21679 - protein, 7 aa, Artificial Sequence
  Description of Artificial Sequence: Synthetic peptide
  XENP019682 vlCDR2
YASHRYT

SEQ ID NO: 21680 - protein, 9 aa, Artificial Sequence
  Description of Artificial Sequence: Synthetic peptide
  XENP019682 vlCDR3
QQDFSSPRT

SEQ ID NO: 21681 - protein, 451 aa, Artificial Sequence; identical to SEQ ID NO: 21391
  Description of Artificial Sequence: Synthetic polypeptide
  XENP019683 1G6_H1.280_L1.193_IgG1_PVA_/S267K Heavy Chain

SEQ ID NO: 21682 - protein, 122 aa, Artificial Sequence; identical to SEQ ID NO: 15593
  Description of Artificial Sequence: Synthetic polypeptide
  VH of XENP019683

SEQ ID NO: 21683 - protein, 5 aa, Artificial Sequence
  Description of Artificial Sequence: Synthetic peptide
  XENP019683 vhCDR1
NYWMN

SEQ ID NO: 21684 - protein, 19 aa, Artificial Sequence
  Description of Artificial Sequence: Synthetic peptide
  XENP019683 vhCDR2
EIRLYSNNYATHYAESVKG

SEQ ID NO: 21685 - protein, 11 aa, Artificial Sequence
  Description of Artificial Sequence: Synthetic peptide
  XENP019683 vhCDR3
YYGNYGGYFDV

SEQ ID NO: 21686 - protein, 214 aa, Artificial Sequence; identical to SEQ ID NO: 21476
  Description of Artificial Sequence: Synthetic polypeptide
  XENP019683 1G6_H1.280_L1.193_IgG1_PVA_/S267K Light Chain

SEQ ID NO: 21687 - protein, 107 aa, Artificial Sequence; identical to SEQ ID NO: 15666
  Description of Artificial Sequence: Synthetic polypeptide
  VL of XENP019683

SEQ ID NO: 21688 - protein, 11 aa, Artificial Sequence
  Description of Artificial Sequence: Synthetic peptide
  XENP019683 vlCDR1
RASQSVGNDVA

SEQ ID NO: 21689 - protein, 7 aa, Artificial Sequence
  Description of Artificial Sequence: Synthetic peptide
  XENP019683 vlCDR2
YASHRYT

SEQ ID NO: 21690 - protein, 9 aa, Artificial Sequence
  Description of Artificial Sequence: Synthetic peptide
  XENP019683 vlCDR3
QQDFSSPRT

SEQ ID NO: 21691 - protein, 451 aa, Artificial Sequence; identical to SEQ ID NO: 21401
  Description of Artificial Sequence: Synthetic polypeptide
  XENP019684 1G6_H1.281_L1.193_IgG1_PVA_/S267K Heavy Chain

SEQ ID NO: 21692 - protein, 122 aa, Artificial Sequence; identical to SEQ ID NO: 15602
  Description of Artificial Sequence: Synthetic polypeptide
  VH of XENP019684

SEQ ID NO: 21693 - protein, 5 aa, Artificial Sequence
  Description of Artificial Sequence: Synthetic peptide
  XENP019684 vhCDR1
NYWMN

SEQ ID NO: 21694 - protein, 19 aa, Artificial Sequence
  Description of Artificial Sequence: Synthetic peptide
  XENP019684 vhCDR2
EIRLYSNNYATHYAESVKG

SEQ ID NO: 21695 - protein, 11 aa, Artificial Sequence
  Description of Artificial Sequence: Synthetic peptide
  XENP019684 vhCDR3
YYGNYGGYFDV

SEQ ID NO: 21696 - protein, 214 aa, Artificial Sequence; identical to SEQ ID NO: 21476
  Description of Artificial Sequence: Synthetic polypeptide
  XENP019684 1G6_H1.281_L1.193_IgG1_PVA_/S267K Light Chain

SEQ ID NO: 21697 - protein, 107 aa, Artificial Sequence; identical to SEQ ID NO: 15666
  Description of Artificial Sequence: Synthetic polypeptide
  VL of XENP019684

SEQ ID NO: 21698 - protein, 11 aa, Artificial Sequence
  Description of Artificial Sequence: Synthetic peptide
  XENP019684 vlCDR1
RASQSVGNDVA

SEQ ID NO: 21699 - protein, 7 aa, Artificial Sequence
  Description of Artificial Sequence: Synthetic peptide
  XENP019684 vlCDR2
YASHRYT

SEQ ID NO: 21700 - protein, 9 aa, Artificial Sequence
  Description of Artificial Sequence: Synthetic peptide
  XENP019684 vlCDR3
QQDFSSPRT

SEQ ID NO: 21701 - protein, 451 aa, Artificial Sequence; identical to SEQ ID NO: 21411
  Description of Artificial Sequence: Synthetic polypeptide
  XENP019685 1G6_H1.282_L1.193_IgG1_PVA_/S267K Heavy Chain

SEQ ID NO: 21702 - protein, 122 aa, Artificial Sequence; identical to SEQ ID NO: 15611
  Description of Artificial Sequence: Synthetic polypeptide
  VH of XENP019685

SEQ ID NO: 21703 - protein, 5 aa, Artificial Sequence
  Description of Artificial Sequence: Synthetic peptide
  XENP019685 vhCDR1
NYWMN

SEQ ID NO: 21704 - protein, 19 aa, Artificial Sequence
  Description of Artificial Sequence: Synthetic peptide
  XENP019685 vhCDR2
EIRLYSNNYATHYAESVKG

SEQ ID NO: 21705 - protein, 11 aa, Artificial Sequence
  Description of Artificial Sequence: Synthetic peptide
  XENP019685 vhCDR3
YYGNYGGYFDV

SEQ ID NO: 21706 - protein, 214 aa, Artificial Sequence; identical to SEQ ID NO: 21476
  Description of Artificial Sequence: Synthetic polypeptide
  XENP019685 1G6_H1.282_L1.193_IgG1_PVA_/S267K Light Chain

SEQ ID NO: 21707 - protein, 107 aa, Artificial Sequence; identical to SEQ ID NO: 15666
  Description of Artificial Sequence: Synthetic polypeptide
  VL of XENP019685

SEQ ID NO: 21708 - protein, 11 aa, Artificial Sequence
  Description of Artificial Sequence: Synthetic peptide
  XENP019685 vlCDR1
RASQSVGNDVA

SEQ ID NO: 21709 - protein, 7 aa, Artificial Sequence
  Description of Artificial Sequence: Synthetic peptide
  XENP019685 vlCDR2
YASHRYT

SEQ ID NO: 21710 - protein, 9 aa, Artificial Sequence
  Description of Artificial Sequence: Synthetic peptide
  XENP019685 vlCDR3
QQDFSSPRT

SEQ ID NO: 21711 - protein, 451 aa, Artificial Sequence; identical to SEQ ID NO: 21381
  Description of Artificial Sequence: Synthetic polypeptide
  XENP019686 1G6_H1.279_L1.194_IgG1_PVA_/S267K Heavy Chain

SEQ ID NO: 21712 - protein, 122 aa, Artificial Sequence; identical to SEQ ID NO: 2872
  Description of Artificial Sequence: Synthetic polypeptide
  VH of XENP019686

SEQ ID NO: 21713 - protein, 5 aa, Artificial Sequence
  Description of Artificial Sequence: Synthetic peptide
  XENP019686 vhCDR1
NYWMN

SEQ ID NO: 21714 - protein, 19 aa, Artificial Sequence
  Description of Artificial Sequence: Synthetic peptide
  XENP019686 vhCDR2
EIRLYSNNYATHYAESVKG

SEQ ID NO: 21715 - protein, 11 aa, Artificial Sequence
  Description of Artificial Sequence: Synthetic peptide
  XENP019686 vhCDR3
YYGNYGGYFDV

SEQ ID NO: 21716 - protein, 214 aa, Artificial Sequence; identical to SEQ ID NO: 21486
  Description of Artificial Sequence: Synthetic polypeptide
  XENP019686 1G6_H1.279_L1.194_IgG1_PVA_/S267K Light Chain

SEQ ID NO: 21717 - protein, 107 aa, Artificial Sequence; identical to SEQ ID NO: 2871
  Description of Artificial Sequence: Synthetic polypeptide
  VL of XENP019686

SEQ ID NO: 21718 - protein, 11 aa, Artificial Sequence
  Description of Artificial Sequence: Synthetic peptide
  XENP019686 vlCDR1
RASQSVGNDVA

SEQ ID NO: 21719 - protein, 7 aa, Artificial Sequence
  Description of Artificial Sequence: Synthetic peptide
  XENP019686 vlCDR2
YASHRYT

SEQ ID NO: 21720 - protein, 9 aa, Artificial Sequence
  Description of Artificial Sequence: Synthetic peptide
  XENP019686 vlCDR3
QQDFSSPRT

SEQ ID NO: 21721 - protein, 451 aa, Artificial Sequence; identical to SEQ ID NO: 21391
  Description of Artificial Sequence: Synthetic polypeptide
  XENP019687 1G6_H1.280_L1.194_IgG1_PVA_/S267K Heavy Chain

SEQ ID NO: 21722 - protein, 122 aa, Artificial Sequence; identical to SEQ ID NO: 15593
  Description of Artificial Sequence: Synthetic polypeptide
  VH of XENP019687

SEQ ID NO: 21723 - protein, 5 aa, Artificial Sequence
  Description of Artificial Sequence: Synthetic peptide
  XENP019687 vhCDR1
NYWMN

SEQ ID NO: 21724 - protein, 19 aa, Artificial Sequence
  Description of Artificial Sequence: Synthetic peptide
  XENP019687 vhCDR2
EIRLYSNNYATHYAESVKG

SEQ ID NO: 21725 - protein, 11 aa, Artificial Sequence
  Description of Artificial Sequence: Synthetic peptide
  XENP019687 vhCDR3
YYGNYGGYFDV

SEQ ID NO: 21726 - protein, 214 aa, Artificial Sequence; identical to SEQ ID NO: 21486
  Description of Artificial Sequence: Synthetic polypeptide
  XENP019687 1G6_H1.280_L1.194_IgG1_PVA_/S267K Light Chain

SEQ ID NO: 21727 - protein, 107 aa, Artificial Sequence; identical to SEQ ID NO: 2871
  Description of Artificial Sequence: Synthetic polypeptide
  VL of XENP019687

SEQ ID NO: 21728 - protein, 11 aa, Artificial Sequence
  Description of Artificial Sequence: Synthetic peptide
  XENP019687 vlCDR1
RASQSVGNDVA

SEQ ID NO: 21729 - protein, 7 aa, Artificial Sequence
  Description of Artificial Sequence: Synthetic peptide
  XENP019687 vlCDR2
YASHRYT

SEQ ID NO: 21730 - protein, 9 aa, Artificial Sequence
  Description of Artificial Sequence: Synthetic peptide
  XENP019687 vlCDR3
QQDFSSPRT

SEQ ID NO: 21731 - protein, 451 aa, Artificial Sequence; identical to SEQ ID NO: 21401
  Description of Artificial Sequence: Synthetic polypeptide
  XENP019688 1G6_H1.281_L1.194_IgG1_PVA_/S267K Heavy Chain

SEQ ID NO: 21732 - protein, 122 aa, Artificial Sequence; identical to SEQ ID NO: 15602
  Description of Artificial Sequence: Synthetic polypeptide
  VH of XENP019688

SEQ ID NO: 21733 - protein, 5 aa, Artificial Sequence
  Description of Artificial Sequence: Synthetic peptide
  XENP019688 vhCDR1
NYWMN

SEQ ID NO: 21734 - protein, 19 aa, Artificial Sequence
  Description of Artificial Sequence: Synthetic peptide
  XENP019688 vhCDR2
EIRLYSNNYATHYAESVKG

SEQ ID NO: 21735 - protein, 11 aa, Artificial Sequence
  Description of Artificial Sequence: Synthetic peptide
  XENP019688 vhCDR3
YYGNYGGYFDV

SEQ ID NO: 21736 - protein, 214 aa, Artificial Sequence; identical to SEQ ID NO: 21486
  Description of Artificial Sequence: Synthetic polypeptide
  XENP019688 1G6_H1.281_L1.194_IgG1_PVA_/S267K Light Chain

SEQ ID NO: 21737 - protein, 107 aa, Artificial Sequence; identical to SEQ ID NO: 2871
  Description of Artificial Sequence: Synthetic polypeptide
  VL of XENP019688

SEQ ID NO: 21738 - protein, 11 aa, Artificial Sequence
  Description of Artificial Sequence: Synthetic peptide
  XENP019688 vlCDR1
RASQSVGNDVA

SEQ ID NO: 21739 - protein, 7 aa, Artificial Sequence
  Description of Artificial Sequence: Synthetic peptide
  XENP019688 vlCDR2
YASHRYT

SEQ ID NO: 21740 - protein, 9 aa, Artificial Sequence
  Description of Artificial Sequence: Synthetic peptide
  XENP019688 vlCDR3
QQDFSSPRT

SEQ ID NO: 21741 - protein, 451 aa, Artificial Sequence; identical to SEQ ID NO: 21411
  Description of Artificial Sequence: Synthetic polypeptide
  XENP019689 1G6_H1.282_L1.194_IgG1_PVA_/S267K Heavy Chain

SEQ ID NO: 21742 - protein, 122 aa, Artificial Sequence; identical to SEQ ID NO: 15611
  Description of Artificial Sequence: Synthetic polypeptide
  VH of XENP019689

SEQ ID NO: 21743 - protein, 5 aa, Artificial Sequence
  Description of Artificial Sequence: Synthetic peptide
  XENP019689 vhCDR1
NYWMN

SEQ ID NO: 21744 - protein, 19 aa, Artificial Sequence
  Description of Artificial Sequence: Synthetic peptide
  XENP019689 vhCDR2
EIRLYSNNYATHYAESVKG

SEQ ID NO: 21745 - protein, 11 aa, Artificial Sequence
  Description of Artificial Sequence: Synthetic peptide
  XENP019689 vhCDR3
YYGNYGGYFDV

SEQ ID NO: 21746 - protein, 214 aa, Artificial Sequence; identical to SEQ ID NO: 21486
  Description of Artificial Sequence: Synthetic polypeptide
  XENP019689 1G6_H1.282_L1.194_IgG1_PVA_/S267K Light Chain

SEQ ID NO: 21747 - protein, 107 aa, Artificial Sequence; identical to SEQ ID NO: 2871
  Description of Artificial Sequence: Synthetic polypeptide
  VL of XENP019689

SEQ ID NO: 21748 - protein, 11 aa, Artificial Sequence
  Description of Artificial Sequence: Synthetic peptide
  XENP019689 vlCDR1
RASQSVGNDVA

SEQ ID NO: 21749 - protein, 7 aa, Artificial Sequence
  Description of Artificial Sequence: Synthetic peptide
  XENP019689 vlCDR2
YASHRYT

SEQ ID NO: 21750 - protein, 9 aa, Artificial Sequence
  Description of Artificial Sequence: Synthetic peptide
  XENP019689 vlCDR3
QQDFSSPRT

SEQ ID NO: 21751 - protein, 449 aa, Artificial Sequence
  Description of Artificial Sequence: Synthetic polypeptide
  XENP020156 2E9_H1L1_IgG1_PVA_/S267K Heavy Chain
QVQLVQSGAEVKKPGASVKVSCKASGYAFTNYWLGWVRQAPGQGLEWMGNFYPGSSNTYYNEKFQGRVTMTADKSISTAYMELSRLRSDDTAVYFCARHYGTNYRYFDVWGAGTLVTVSSASTKGPSVFPLAPSSKSTSGGTAALGCLVKDYFPEPVTVSWNSGALTSGVHTFPAVLQSSGLYSLSSVVTVPSSSLGTQTYICNVNHKPSNTKVDKKVEPKSCDKTHTCPPCPAPPVAGPSVFLFPPKPKDTLMISRTPEVTCVVVDVKHEDPEVKFNWYVDGVEVHNAKTKPREEQYNSTYRVVSVLTVLHQDWLNGKEYKCKVSNKALPAPIEKTISKAKGQPREPQVYTLPPSREEMTKNQVSLTCLVKGFYPSDIAVEWESNGQPENNYKTTPPVLDSDGSFFLYSKLTVDKSRWQQGNVFSCSVMHEALHNHYTQKSLSLSPGK

SEQ ID NO: 21752 - protein, 120 aa, Artificial Sequence; identical to SEQ ID NO: 3091
  Description of Artificial Sequence: Synthetic polypeptide
  VH of XENP020156

SEQ ID NO: 21753 - protein, 5 aa, Artificial Sequence
  Description of Artificial Sequence: Synthetic peptide
  XENP020156 vhCDR1
NYWLG

SEQ ID NO: 21754 - protein, 17 aa, Artificial Sequence
  Description of Artificial Sequence: Synthetic peptide
  XENP020156 vhCDR2
NFYPGSSNTYYNEKFQG

SEQ ID NO: 21755 - protein, 11 aa, Artificial Sequence
  Description of Artificial Sequence: Synthetic peptide
  XENP020156 vhCDR3
HYGTNYRYFDV

SEQ ID NO: 21756 - protein, 214 aa, Artificial Sequence; identical to SEQ ID NO: 3140
  Description of Artificial Sequence: Synthetic polypeptide
  XENP020156 2E9_H1L1_IgG1_PVA_/S267K Light Chain

SEQ ID NO: 21757 - protein, 107 aa, Artificial Sequence; identical to SEQ ID NO: 3092
  Description of Artificial Sequence: Synthetic polypeptide
  VL of XENP020156

SEQ ID NO: 21758 - protein, 11 aa, Artificial Sequence
  Description of Artificial Sequence: Synthetic peptide
  XENP020156 vlCDR1
RASQSVSNDVA

SEQ ID NO: 21759 - protein, 7 aa, Artificial Sequence
  Description of Artificial Sequence: Synthetic peptide
  XENP020156 vlCDR2
YASNRYT

SEQ ID NO: 21760 - protein, 9 aa, Artificial Sequence
  Description of Artificial Sequence: Synthetic peptide
  XENP020156 vlCDR3
QQDYSSPYT

SEQ ID NO: 21761 - protein, 449 aa, Artificial Sequence
  Description of Artificial Sequence: Synthetic polypeptide
  XENP020157 2E9_H2L1_IgG1_PVA_/S267K Heavy Chain
EVQLVQSGAEVKKPGESLKISCKASGYAFTNYWLGWVRQMPGKGLEWMGNFYPGSSNTYYNPSFQGQVTISADKSISTAYLQWSSLKASDTAMYFCARHYGTNYRYFDVWGAGTLVTVSSASTKGPSVFPLAPSSKSTSGGTAALGCLVKDYFPEPVTVSWNSGALTSGVHTFPAVLQSSGLYSLSSVVTVPSSSLGTQTYICNVNHKPSNTKVDKKVEPKSCDKTHTCPPCPAPPVAGPSVFLFPPKPKDTLMISRTPEVTCVVVDVKHEDPEVKFNWYVDGVEVHNAKTKPREEQYNSTYRVVSVLTVLHQDWLNGKEYKCKVSNKALPAPIEKTISKAKGQPREPQVYTLPPSREEMTKNQVSLTCLVKGFYPSDIAVEWESNGQPENNYKTTPPVLDSDGSFFLYSKLTVDKSRWQQGNVFSCSVMHEALHNHYTQKSLSLSPGK

SEQ ID NO: 21762 - protein, 120 aa, Artificial Sequence; identical to SEQ ID NO: 16097
  Description of Artificial Sequence: Synthetic polypeptide
  VH of XENP020157

SEQ ID NO: 21763 - protein, 5 aa, Artificial Sequence
  Description of Artificial Sequence: Synthetic peptide
  XENP020157 vhCDR1
NYWLG

SEQ ID NO: 21764 - protein, 17 aa, Artificial Sequence
  Description of Artificial Sequence: Synthetic peptide
  XENP020157 vhCDR2
NFYPGSSNTYYNPSFQG

SEQ ID NO: 21765 - protein, 11 aa, Artificial Sequence
  Description of Artificial Sequence: Synthetic peptide
  XENP020157 vhCDR3
HYGTNYRYFDV

SEQ ID NO: 21766 - protein, 214 aa, Artificial Sequence; identical to SEQ ID NO: 3140
  Description of Artificial Sequence: Synthetic polypeptide
  XENP020157 2E9_H2L1_IgG1_PVA_/S267K Light Chain

SEQ ID NO: 21767 - protein, 107 aa, Artificial Sequence; identical to SEQ ID NO: 3092
  Description of Artificial Sequence: Synthetic polypeptide
  VL of XENP020157

SEQ ID NO: 21768 - protein, 11 aa, Artificial Sequence
  Description of Artificial Sequence: Synthetic peptide
  XENP020157 vlCDR1
RASQSVSNDVA

SEQ ID NO: 21769 - protein, 7 aa, Artificial Sequence
  Description of Artificial Sequence: Synthetic peptide
  XENP020157 vlCDR2
YASNRYT

SEQ ID NO: 21770 - protein, 9 aa, Artificial Sequence
  Description of Artificial Sequence: Synthetic peptide
  XENP020157 vlCDR3
QQDYSSPYT

SEQ ID NO: 21771 - protein, 444 aa, Artificial Sequence
  Description of Artificial Sequence: Synthetic polypeptide
  XENP020158 3C11(PD-1)_H1L1_IgG1_PVA_/S267K Heavy Chain
QVQLVQSGAEVKKPGASVKVSCKASGYTFTSYWMHWVRQAPGQGLEWMGAIYPGNIATSYNQKFQGRVTMTADTSTSTAYMELSSLRSEDTAVYYCTTSYVMDYWGQGTLVTVSSASTKGPSVFPLAPSSKSTSGGTAALGCLVKDYFPEPVTVSWNSGALTSGVHTFPAVLQSSGLYSLSSVVTVPSSSLGTQTYICNVNHKPSNTKVDKKVEPKSCDKTHTCPPCPAPPVAGPSVFLFPPKPKDTLMISRTPEVTCVVVDVKHEDPEVKFNWYVDGVEVHNAKTKPREEQYNSTYRVVSVLTVLHQDWLNGKEYKCKVSNKALPAPIEKTISKAKGQPREPQVYTLPPSREEMTKNQVSLTCLVKGFYPSDIAVEWESNGQPENNYKTTPPVLDSDGSFFLYSKLTVDKSRWQQGNVFSCSVMHEALHNHYTQKSLSLSPGK

SEQ ID NO: 21772 - protein, 115 aa, Artificial Sequence; identical to SEQ ID NO: 16106
  Description of Artificial Sequence: Synthetic polypeptide
  VH of XENP020158

SEQ ID NO: 21773 - protein, 5 aa, Artificial Sequence
  Description of Artificial Sequence: Synthetic peptide
  XENP020158 vhCDR1
SYWMH

SEQ ID NO: 21774 - protein, 17 aa, Artificial Sequence
  Description of Artificial Sequence: Synthetic peptide
  XENP020158 vhCDR2
AIYPGNIATSYNQKFQG

SEQ ID NO: 21775 - protein, 6 aa, Artificial Sequence
  Description of Artificial Sequence: Synthetic peptide
  XENP020158 vhCDR3
SYVMDY

SEQ ID NO: 21776 - protein, 214 aa, Artificial Sequence
  Description of Artificial Sequence: Synthetic polypeptide
  XENP020158 3C11(PD-1)_H1L1_IgG1_PVA_/S267K Light Chain
DIVMTQSPSSLSASVGDRVTITCQASQDINSYLSWFQQKPGKSPKTLIYRANRLVDGVPSRFSGSGSGQDYTFTISSLQPEDIATYYCLQYDEFPYTFGGGTKVEIKRTVAAPSVFIFPPSDEQLKSGTASVVCLLNNFYPREAKVQWKVDNALQSGNSQESVTEQDSKDSTYSLSSTLTLSKADYEKHKVYACEVTHQGLSSPVTKSFNRGEC

SEQ ID NO: 21777 - protein, 107 aa, Artificial Sequence; identical to SEQ ID NO: 16107
  Description of Artificial Sequence: Synthetic polypeptide
  VL of XENP020158

SEQ ID NO: 21778 - protein, 11 aa, Artificial Sequence
  Description of Artificial Sequence: Synthetic peptide
  XENP020158 vlCDR1
QASQDINSYLS

SEQ ID NO: 21779 - protein, 7 aa, Artificial Sequence
  Description of Artificial Sequence: Synthetic peptide
  XENP020158 vlCDR2
RANRLVD

SEQ ID NO: 21780 - protein, 9 aa, Artificial Sequence
  Description of Artificial Sequence: Synthetic peptide
  XENP020158 vlCDR3
LQYDEFPYT

SEQ ID NO: 21781 - protein, 441 aa, Artificial Sequence
  Description of Artificial Sequence: Synthetic polypeptide
  XENP020159 3G12_H1L1_IgG1_PVA_/S267K Heavy Chain
QVQLVQSGAEVKKPGASVKVSCKASGYTFTSYWMHWVRQAPGQGLEWMGVIDPSDSYTSYNQKFQGRVTMTVDTSTSTAYMELSSLRSEDTAVYYCTGAYYWGQGTLVTVSSASTKGPSVFPLAPSSKSTSGGTAALGCLVKDYFPEPVTVSWNSGALTSGVHTFPAVLQSSGLYSLSSVVTVPSSSLGTQTYICNVNHKPSNTKVDKKVEPKSCDKTHTCPPCPAPPVAGPSVFLFPPKPKDTLMISRTPEVTCVVVDVKHEDPEVKFNWYVDGVEVHNAKTKPREEQYNSTYRVVSVLTVLHQDWLNGKEYKCKVSNKALPAPIEKTISKAKGQPREPQVYTLPPSREEMTKNQVSLTCLVKGFYPSDIAVEWESNGQPENNYKTTPPVLDSDGSFFLYSKLTVDKSRWQQGNVFSCSVMHEALHNHYTQKSLSLSPGK

SEQ ID NO: 21782 - protein, 112 aa, Artificial Sequence; identical to SEQ ID NO: 16115
  Description of Artificial Sequence: Synthetic polypeptide
  VH of XENP020159

SEQ ID NO: 21783 - protein, 5 aa, Artificial Sequence
  Description of Artificial Sequence: Synthetic peptide
  XENP020159 vhCDR1
SYWMH

SEQ ID NO: 21784 - protein, 17 aa, Artificial Sequence
  Description of Artificial Sequence: Synthetic peptide
  XENP020159 vhCDR2
VIDPSDSYTSYNQKFQG

SEQ ID NO: 21785 - protein, 3 aa, Artificial Sequence
  Description of Artificial Sequence: Synthetic peptide
  XENP020159 vhCDR3
AYY

SEQ ID NO: 21786 - protein, 214 aa, Artificial Sequence
  Description of Artificial Sequence: Synthetic polypeptide
  XENP020159 3G12_H1L1_IgG1_PVA_/S267K Light Chain
DIVLTQSPSSLSASVGDRVTITCRASQGISSNIGWLQQKPGKSFKGLIYHGTNLEDGVPSRFTGSGSGADYTLTISSLQPEDFATYYCVQYAQSPWTFGGGTKVEIKRTVAAPSVFIFPPSDEQLKSGTASVVCLLNNFYPREAKVQWKVDNALQSGNSQESVTEQDSKDSTYSLSSTLTLSKADYEKHKVYACEVTHQGLSSPVTKSFNRGEC

SEQ ID NO: 21787 - protein, 107 aa, Artificial Sequence; identical to SEQ ID NO: 16116
  Description of Artificial Sequence: Synthetic polypeptide
  VL of XENP020159

SEQ ID NO: 21788 - protein, 11 aa, Artificial Sequence
  Description of Artificial Sequence: Synthetic peptide
  XENP020159 vlCDR1
RASQGISSNIG

SEQ ID NO: 21789 - protein, 7 aa, Artificial Sequence
  Description of Artificial Sequence: Synthetic peptide
  XENP020159 vlCDR2
HGTNLED

SEQ ID NO: 21790 - protein, 9 aa, Artificial Sequence
  Description of Artificial Sequence: Synthetic peptide
  XENP020159 vlCDR3
VQYAQSPWT

SEQ ID NO: 21791 - protein, 441 aa, Artificial Sequence
  Description of Artificial Sequence: Synthetic polypeptide
  XENP020160 5C4_H1L1_IgG1_PVA_/S267K Heavy Chain
QVQLVQSGAEVKKPGASVKVSCKASGYTFTDYWMHWLRQAPGQGLEWMGAIDTSDSYPTYNQKFQGRVTMTVDDSTSTAYMELSSLRSEDTAVYYCTRFDYWGQGTLVTVSSASTKGPSVFPLAPSSKSTSGGTAALGCLVKDYFPEPVTVSWNSGALTSGVHTFPAVLQSSGLYSLSSVVTVPSSSLGTQTYICNVNHKPSNTKVDKKVEPKSCDKTHTCPPCPAPPVAGPSVFLFPPKPKDTLMISRTPEVTCVVVDVKHEDPEVKFNWYVDGVEVHNAKTKPREEQYNSTYRVVSVLTVLHQDWLNGKEYKCKVSNKALPAPIEKTISKAKGQPREPQVYTLPPSREEMTKNQVSLTCLVKGFYPSDIAVEWESNGQPENNYKTTPPVLDSDGSFFLYSKLTVDKSRWQQGNVFSCSVMHEALHNHYTQKSLSLSPGK

SEQ ID NO: 21792 - protein, 112 aa, Artificial Sequence; identical to SEQ ID NO: 16124
  Description of Artificial Sequence: Synthetic polypeptide
  VH of XENP020160

SEQ ID NO: 21793 - protein, 5 aa, Artificial Sequence
  Description of Artificial Sequence: Synthetic peptide
  XENP020160 vhCDR1
DYWMH

SEQ ID NO: 21794 - protein, 17 aa, Artificial Sequence
  Description of Artificial Sequence: Synthetic peptide
  XENP020160 vhCDR2
AIDTSDSYPTYNQKFQG

SEQ ID NO: 21795 - protein, 3 aa, Artificial Sequence
  Description of Artificial Sequence: Synthetic peptide
  XENP020160 vhCDR3
FDY

SEQ ID NO: 21796 - protein, 214 aa, Artificial Sequence
  Description of Artificial Sequence: Synthetic polypeptide
  XENP020160 5C4_H1L1_IgG1_PVA_/S267K Light Chain
DIVMTQSPDSLAVSLGERATINCKASQSVSNDVAWYQQKPGQSPKLLIYYASNRYTGVPDRFTGSGYGTDFTLTISSLQAEDVAVYFCQQDYSSPYTFGGGTKVEIKRTVAAPSVFIFPPSDEQLKSGTASVVCLLNNFYPREAKVQWKVDNALQSGNSQESVTEQDSKDSTYSLSSTLTLSKADYEKHKVYACEVTHQGLSSPVTKSFNRGEC

SEQ ID NO: 21797 - protein, 107 aa, Artificial Sequence; identical to SEQ ID NO: 16125
  Description of Artificial Sequence: Synthetic polypeptide
  VL of XENP020160

SEQ ID NO: 21798 - protein, 11 aa, Artificial Sequence
  Description of Artificial Sequence: Synthetic peptide
  XENP020160 vlCDR1
KASQSVSNDVA

SEQ ID NO: 21799 - protein, 7 aa, Artificial Sequence
  Description of Artificial Sequence: Synthetic peptide
  XENP020160 vlCDR2
YASNRYT

SEQ ID NO: 21800 - protein, 9 aa, Artificial Sequence
  Description of Artificial Sequence: Synthetic peptide
  XENP020160 vlCDR3
QQDYSSPYT

SEQ ID NO: 21801 - protein, 441 aa, Artificial Sequence
  Description of Artificial Sequence: Synthetic polypeptide
  XENP020161 5C4_H2L1_IgG1_PVA_/S267K Heavy Chain
QVQLVQSGSELKKPGASVKVSCKASGYTFTDYWMHWLRQAPGQGLEWMGAIDTSDSYPTYNQGFTGRFVFSVDDSVSTAYLQISSLKAEDTAVYYCTRFDYWGQGTLVTVSSASTKGPSVFPLAPSSKSTSGGTAALGCLVKDYFPEPVTVSWNSGALTSGVHTFPAVLQSSGLYSLSSVVTVPSSSLGTQTYICNVNHKPSNTKVDKKVEPKSCDKTHTCPPCPAPPVAGPSVFLFPPKPKDTLMISRTPEVTCVVVDVKHEDPEVKFNWYVDGVEVHNAKTKPREEQYNSTYRVVSVLTVLHQDWLNGKEYKCKVSNKALPAPIEKTISKAKGQPREPQVYTLPPSREEMTKNQVSLTCLVKGFYPSDIAVEWESNGQPENNYKTTPPVLDSDGSFFLYSKLTVDKSRWQQGNVFSCSVMHEALHNHYTQKSLSLSPGK

SEQ ID NO: 21802 - protein, 112 aa, Artificial Sequence; identical to SEQ ID NO: 16133
  Description of Artificial Sequence: Synthetic polypeptide
  VH of XENP020161

SEQ ID NO: 21803 - protein, 5 aa, Artificial Sequence
  Description of Artificial Sequence: Synthetic peptide
  XENP020161 vhCDR1
DYWMH

SEQ ID NO: 21804 - protein, 17 aa, Artificial Sequence
  Description of Artificial Sequence: Synthetic peptide
  XENP020161 vhCDR2
AIDTSDSYPTYNQGFTG

SEQ ID NO: 21805 - protein, 3 aa, Artificial Sequence
  Description of Artificial Sequence: Synthetic peptide
  XENP020161 vhCDR3
FDY

SEQ ID NO: 21806 - protein, 214 aa, Artificial Sequence; identical to SEQ ID NO: 21796
  Description of Artificial Sequence: Synthetic polypeptide
  XENP020161 5C4_H2L1_IgG1_PVA_/S267K Light Chain

SEQ ID NO: 21807 - protein, 107 aa, Artificial Sequence; identical to SEQ ID NO: 16125
  Description of Artificial Sequence: Synthetic polypeptide
  VL of XENP020161

SEQ ID NO: 21808 - protein, 11 aa, Artificial Sequence
  Description of Artificial Sequence: Synthetic peptide
  XENP020161 vlCDR1
KASQSVSNDVA

SEQ ID NO: 21809 - protein, 7 aa, Artificial Sequence
  Description of Artificial Sequence: Synthetic peptide
  XENP020161 vlCDR2
YASNRYT

SEQ ID NO: 21810 - protein, 9 aa, Artificial Sequence
  Description of Artificial Sequence: Synthetic peptide
  XENP020161 vlCDR3
QQDYSSPYT

SEQ ID NO: 21811 - protein, 449 aa, Artificial Sequence
  Description of Artificial Sequence: Synthetic polypeptide
  XENP016436 25F7_H0L0_IgG1_PVA_/S267K Heavy Chain
QVQLQQWGAGLLKPSETLSLTCAVYGGSFSDYYWNWIRQPPGKGLEWIGEINHNGNTNSNPSLKSRVTLSLDTSKNQFSLKLRSVTAADTAVYYCAFGYSDYEYNWFDPWGQGTLVTVSSASTKGPSVFPLAPSSKSTSGGTAALGCLVKDYFPEPVTVSWNSGALTSGVHTFPAVLQSSGLYSLSSVVTVPSSSLGTQTYICNVNHKPSNTKVDKKVEPKSCDKTHTCPPCPAPPVAGPSVFLFPPKPKDTLMISRTPEVTCVVVDVKHEDPEVKFNWYVDGVEVHNAKTKPREEQYNSTYRVVSVLTVLHQDWLNGKEYKCKVSNKALPAPIEKTISKAKGQPREPQVYTLPPSREEMTKNQVSLTCLVKGFYPSDIAVEWESNGQPENNYKTTPPVLDSDGSFFLYSKLTVDKSRWQQGNVFSCSVMHEALHNHYTQKSLSLSPGK

SEQ ID NO: 21812 - protein, 120 aa, Artificial Sequence
  Description of Artificial Sequence: Synthetic polypeptide
  VH of XENP016436
QVQLQQWGAGLLKPSETLSLTCAVYGGSFSDYYWNWIRQPPGKGLEWIGEINHNGNTNSNPSLKSRVTLSLDTSKNQFSLKLRSVTAADTAVYYCAFGYSDYEYNWFDPWGQGTLVTVSS

SEQ ID NO: 21813 - protein, 5 aa, Artificial Sequence
  Description of Artificial Sequence: Synthetic peptide
  XENP016436 vhCDR1
DYYWN

SEQ ID NO: 21814 - protein, 16 aa, Artificial Sequence
  Description of Artificial Sequence: Synthetic peptide
  XENP016436 vhCDR2
EINHNGNTNSNPSLKS

SEQ ID NO: 21815 - protein, 12 aa, Artificial Sequence
  Description of Artificial Sequence: Synthetic peptide
  XENP016436 vhCDR3
GYSDYEYNWFDP

SEQ ID NO: 21816 - protein, 214 aa, Artificial Sequence
  Description of Artificial Sequence: Synthetic polypeptide
  XENP016436 25F7_H0L0_IgG1_PVA_/S267K Light Chain
EIVLTQSPATLSLSPGERATLSCRASQSISSYLAWYQQKPGQAPRLLIYDASNRATGIPARFSGSGSGTDFTLTISSLEPEDFAVYYCQQRSNWPLTFGQGTNLEIKRTVAAPSVFIFPPSDEQLKSGTASVVCLLNNFYPREAKVQWKVDNALQSGNSQESVTEQDSKDSTYSLSSTLTLSKADYEKHKVYACEVTHQGLSSPVTKSFNRGEC

SEQ ID NO: 21817 - protein, 107 aa, Artificial Sequence; identical to SEQ ID NO: 3821
  Description of Artificial Sequence: Synthetic polypeptide
  VL of XENP016436

SEQ ID NO: 21818 - protein, 11 aa, Artificial Sequence
  Description of Artificial Sequence: Synthetic peptide
  XENP016436 vlCDR1
RASQSISSYLA

SEQ ID NO: 21819 - protein, 7 aa, Artificial Sequence
  Description of Artificial Sequence: Synthetic peptide
  XENP016436 vlCDR2
DASNRAT

SEQ ID NO: 21820 - protein, 9 aa, Artificial Sequence
  Description of Artificial Sequence: Synthetic peptide
  XENP016436 vlCDR3
QQRSNWPLT

SEQ ID NO: 21821 - protein, 447 aa, Artificial Sequence
  Description of Artificial Sequence: Synthetic polypeptide
  XENP019353 1H11_H0L0_IgG1_PVA_/S267K Heavy Chain
QIQLVQSGPELKKPGETVKISCKASGYTFTNYGMNWVKQAPGKGLKWMGWINTYTGEPTYADDFKGRFAFSLETSASTAYLQINNLKNEDTATYFCARGRGMGYFDYWGQGTTLTVSSASTKGPSVFPLAPSSKSTSGGTAALGCLVKDYFPEPVTVSWNSGALTSGVHTFPAVLQSSGLYSLSSVVTVPSSSLGTQTYICNVNHKPSDTKVDKKVEPKSCDKTHTCPPCPAPPVAGPSVFLFPPKPKDTLMISRTPEVTCVVVDVKHEDPEVKFNWYVDGVEVHNAKTKPREEEYNSTYRVVSVLTVLHQDWLNGKEYKCKVSNKALPAPIEKTISKAKGQPREPQVYTLPPSREEMTKNQVSLTCDVSGFYPSDIAVEWESDGQPENNYKTTPPVLDSDGSFFLYSKLTVDKSRWEQGDVFSCSVMHEALHNHYTQKSLSLSPGK

SEQ ID NO: 21822 - protein, 118 aa, Artificial Sequence
  Description of Artificial Sequence: Synthetic polypeptide
  VH of XENP019353
QIQLVQSGPELKKPGETVKISCKASGYTFTNYGMNWVKQAPGKGLKWMGWINTYTGEPTYADDFKGRFAFSLETSASTAYLQINNLKNEDTATYFCARGRGMGYFDYWGQGTTLTVSS

SEQ ID NO: 21823 - protein, 5 aa, Artificial Sequence
  Description of Artificial Sequence: Synthetic peptide
  XENP019353 vhCDR1
NYGMN

SEQ ID NO: 21824 - protein, 17 aa, Artificial Sequence
  Description of Artificial Sequence: Synthetic peptide
  XENP019353 vhCDR2
WINTYTGEPTYADDFKG

SEQ ID NO: 21825 - protein, 9 aa, Artificial Sequence
  Description of Artificial Sequence: Synthetic peptide
  XENP019353 vhCDR3
GRGMGYFDY

SEQ ID NO: 21826 - protein, 214 aa, Artificial Sequence
  Description of Artificial Sequence: Synthetic polypeptide
  XENP019353 1H11_H0L0_IgG1_PVA_/S267K Light Chain
DIQMTQSPASLSVSVGETVTITCRASENIYSNLAWYQQKQGKSPQLLVYAATNLADGVPSRFSGSGSGTQYSLKINSLQSGDFGNYYCQHFWTTPRTFGGGTKLEIKRTVAAPSVFIFPPSDEQLKSGTASVVCLLNNFYPREAKVQWKVDNALQSGNSQESVTEQDSKDSTYSLSSTLTLSKADYEKHKVYACEVTHQGLSSPVTKSFNRGEC

SEQ ID NO: 21827 - protein, 107 aa, Artificial Sequence
  Description of Artificial Sequence: Synthetic polypeptide
  VL of XENP019353
DIQMTQSPASLSVSVGETVTITCRASENIYSNLAWYQQKQGKSPQLLVYAATNLADGVPSRFSGSGSGTQYSLKINSLQSGDFGNYYCQHFWTTPRTFGGGTKLEIK

SEQ ID NO: 21828 - protein, 11 aa, Artificial Sequence
  Description of Artificial Sequence: Synthetic peptide
  XENP019353 vlCDR1
RASENIYSNLA

SEQ ID NO: 21829 - protein, 7 aa, Artificial Sequence
  Description of Artificial Sequence: Synthetic peptide
  XENP019353 vlCDR2
AATNLAD

SEQ ID NO: 21830 - protein, 9 aa, Artificial Sequence
  Description of Artificial Sequence: Synthetic peptide
  XENP019353 vlCDR3
QHFWTTPRT

SEQ ID NO: 21831 - protein, 447 aa, Artificial Sequence
  Description of Artificial Sequence: Synthetic polypeptide
  XENP019354 1H11_H1L1_IgG1_PVA_/S267K Heavy Chain
QIQLVQSGAEVKKPGASVKVSCKASGYTFTNYGMNWVRQAPGQGLEWMGWINTYTGEPTYADKFQGRVTMTLDTSTSTAYMELSSLRSEDTAVYFCARGRGMGYFDYWGQGTLVTVSSASTKGPSVFPLAPSSKSTSGGTAALGCLVKDYFPEPVTVSWNSGALTSGVHTFPAVLQSSGLYSLSSVVTVPSSSLGTQTYICNVNHKPSDTKVDKKVEPKSCDKTHTCPPCPAPPVAGPSVFLFPPKPKDTLMISRTPEVTCVVVDVKHEDPEVKFNWYVDGVEVHNAKTKPREEEYNSTYRVVSVLTVLHQDWLNGKEYKCKVSNKALPAPIEKTISKAKGQPREPQVYTLPPSREEMTKNQVSLTCDVSGFYPSDIAVEWESDGQPENNYKTTPPVLDSDGSFFLYSKLTVDKSRWEQGDVFSCSVMHEALHNHYTQKSLSLSPGK

SEQ ID NO: 21832 - protein, 118 aa, Artificial Sequence
  Description of Artificial Sequence: Synthetic polypeptide
  VH of XENP019354
QIQLVQSGAEVKKPGASVKVSCKASGYTFTNYGMNWVRQAPGQGLEWMGWINTYTGEPTYADKFQGRVTMTLDTSTSTAYMELSSLRSEDTAVYFCARGRGMGYFDYWGQGTLVTVSS

SEQ ID NO: 21833 - protein, 5 aa, Artificial Sequence
  Description of Artificial Sequence: Synthetic peptide
  XENP019354 vhCDR1
NYGMN

SEQ ID NO: 21834 - protein, 17 aa, Artificial Sequence
  Description of Artificial Sequence: Synthetic peptide
  XENP019354 vhCDR2
WINTYTGEPTYADKFQG

SEQ ID NO: 21835 - protein, 9 aa, Artificial Sequence
  Description of Artificial Sequence: Synthetic peptide
  XENP019354 vhCDR3
GRGMGYFDY

SEQ ID NO: 21836 - protein, 214 aa, Artificial Sequence
  Description of Artificial Sequence: Synthetic polypeptide
  XENP019354 1H11_H1L1_IgG1_PVA_/S267K Light Chain
DIQMTQSPSSLSASVGDRVTITCRASENIYSNLAWYQQKPGKSPKLLVYAATNLADGVPSRFSGSGSGTDYTLTISSLQPEDFATYYCQHFWTTPRTFGGGTKVEIKRTVAAPSVFIFPPSDEQLKSGTASVVCLLNNFYPREAKVQWKVDNALQSGNSQESVTEQDSKDSTYSLSSTLTLSKADYEKHKVYACEVTHQGLSSPVTKSFNRGEC

SEQ ID NO: 21837 - protein, 107 aa, Artificial Sequence
  Description of Artificial Sequence: Synthetic polypeptide
  VL of XENP019354
DIQMTQSPSSLSASVGDRVTITCRASENIYSNLAWYQQKPGKSPKLLVYAATNLADGVPSRFSGSGSGTDYTLTISSLQPEDFATYYCQHFWTTPRTFGGGTKVEIK

SEQ ID NO: 21838 - protein, 11 aa, Artificial Sequence
  Description of Artificial Sequence: Synthetic peptide
  XENP019354 vlCDR1
RASENIYSNLA

SEQ ID NO: 21839 - protein, 7 aa, Artificial Sequence
  Description of Artificial Sequence: Synthetic peptide
  XENP019354 vlCDR2
AATNLAD

SEQ ID NO: 21840 - protein, 9 aa, Artificial Sequence
  Description of Artificial Sequence: Synthetic peptide
  XENP019354 vlCDR3
QHFWTTPRT

SEQ ID NO: 21841 - protein, 447 aa, Artificial Sequence; identical to SEQ ID NO: 21831
  Description of Artificial Sequence: Synthetic polypeptide
  XENP019355 1H11_H1L2_IgG1_PVA_/S267K Heavy Chain

SEQ ID NO: 21842 - protein, 118 aa, Artificial Sequence; identical to SEQ ID NO: 21832
  Description of Artificial Sequence: Synthetic polypeptide
  VH of XENP019355

SEQ ID NO: 21843 - protein, 5 aa, Artificial Sequence
  Description of Artificial Sequence: Synthetic peptide
  XENP019355 vhCDR1
NYGMN

SEQ ID NO: 21844 - protein, 17 aa, Artificial Sequence
  Description of Artificial Sequence: Synthetic peptide
  XENP019355 vhCDR2
WINTYTGEPTYADKFQG

SEQ ID NO: 21845 - protein, 9 aa, Artificial Sequence
  Description of Artificial Sequence: Synthetic peptide
  XENP019355 vhCDR3
GRGMGYFDY

SEQ ID NO: 21846 - protein, 214 aa, Artificial Sequence
  Description of Artificial Sequence: Synthetic polypeptide
  XENP019355 1H11_H1L2_IgG1_PVA_/S267K Light Chain
DIQMTQSPATLSVSPGERATLSCRASENIYSNLAWYQQKPGQSPRLLVYAATNLADGVPSRFSGSGSGTEYTLTISSLQSEDFAVYYCQHFWTTPRTFGGGTKVEIKRTVAAPSVFIFPPSDEQLKSGTASVVCLLNNFYPREAKVQWKVDNALQSGNSQESVTEQDSKDSTYSLSSTLTLSKADYEKHKVYACEVTHQGLSSPVTKSFNRGEC

SEQ ID NO: 21847 - protein, 107 aa, Artificial Sequence
  Description of Artificial Sequence: Synthetic polypeptide
  VL of XENP019355
DIQMTQSPATLSVSPGERATLSCRASENIYSNLAWYQQKPGQSPRLLVYAATNLADGVPSRFSGSGSGTEYTLTISSLQSEDFAVYYCQHFWTTPRTFGGGTKVEIK

SEQ ID NO: 21848 - protein, 11 aa, Artificial Sequence
  Description of Artificial Sequence: Synthetic peptide
  XENP019355 vlCDR1
RASENIYSNLA

SEQ ID NO: 21849 - protein, 7 aa, Artificial Sequence
  Description of Artificial Sequence: Synthetic peptide
  XENP019355 vlCDR2
AATNLAD

SEQ ID NO: 21850 - protein, 9 aa, Artificial Sequence
  Description of Artificial Sequence: Synthetic peptide
  XENP019355 vlCDR3
QHFWTTPRT

SEQ ID NO: 21851 - protein, 447 aa, Artificial Sequence
  Description of Artificial Sequence: Synthetic polypeptide
  XENP019356 1H11_H2L1_IgG1_PVA_/S267K Heavy Chain
QIQLVQSGSELKKPGASVKVSCKASGYTFTNYGMNWVRQAPGQGLEWMGWINTYTGEPTYADGFTGRFVFSLDTSVSTAYLQISSLKAEDTAVYFCARGRGMGYFDYWGQGTLVTVSSASTKGPSVFPLAPSSKSTSGGTAALGCLVKDYFPEPVTVSWNSGALTSGVHTFPAVLQSSGLYSLSSVVTVPSSSLGTQTYICNVNHKPSDTKVDKKVEPKSCDKTHTCPPCPAPPVAGPSVFLFPPKPKDTLMISRTPEVTCVVVDVKHEDPEVKFNWYVDGVEVHNAKTKPREEEYNSTYRVVSVLTVLHQDWLNGKEYKCKVSNKALPAPIEKTISKAKGQPREPQVYTLPPSREEMTKNQVSLTCDVSGFYPSDIAVEWESDGQPENNYKTTPPVLDSDGSFFLYSKLTVDKSRWEQGDVFSCSVMHEALHNHYTQKSLSLSPGK

SEQ ID NO: 21852 - protein, 118 aa, Artificial Sequence
  Description of Artificial Sequence: Synthetic polypeptide
  VH of XENP019356
QIQLVQSGSELKKPGASVKVSCKASGYTFTNYGMNWVRQAPGQGLEWMGWINTYTGEPTYADGFTGRFVFSLDTSVSTAYLQISSLKAEDTAVYFCARGRGMGYFDYWGQGTLVTVSS

SEQ ID NO: 21853 - protein, 5 aa, Artificial Sequence
  Description of Artificial Sequence: Synthetic peptide
  XENP019356 vhCDR1
NYGMN

SEQ ID NO: 21854 - protein, 17 aa, Artificial Sequence
  Description of Artificial Sequence: Synthetic peptide
  XENP019356 vhCDR2
WINTYTGEPTYADGFTG

SEQ ID NO: 21855 - protein, 9 aa, Artificial Sequence
  Description of Artificial Sequence: Synthetic peptide
  XENP019356 vhCDR3
GRGMGYFDY

SEQ ID NO: 21856 - protein, 214 aa, Artificial Sequence; identical to SEQ ID NO: 21836
  Description of Artificial Sequence: Synthetic polypeptide
  XENP019356 1H11_H2L1_IgG1_PVA_/S267K Light Chain

SEQ ID NO: 21857 - protein, 107 aa, Artificial Sequence; identical to SEQ ID NO: 21837
  Description of Artificial Sequence: Synthetic polypeptide
  VL of XENP019356

SEQ ID NO: 21858 - protein, 11 aa, Artificial Sequence
  Description of Artificial Sequence: Synthetic peptide
  XENP019356 vlCDR1
RASENIYSNLA

SEQ ID NO: 21859 - protein, 7 aa, Artificial Sequence
  Description of Artificial Sequence: Synthetic peptide
  XENP019356 vlCDR2
AATNLAD

SEQ ID NO: 21860 - protein, 9 aa, Artificial Sequence
  Description of Artificial Sequence: Synthetic peptide
  XENP019356 vlCDR3
QHFWTTPRT

SEQ ID NO: 21861 - protein, 447 aa, Artificial Sequence; identical to SEQ ID NO: 21851
  Description of Artificial Sequence: Synthetic polypeptide
  XENP019357 1H11_H2L2_IgG1_PVA_/S267K Heavy Chain

SEQ ID NO: 21862 - protein, 118 aa, Artificial Sequence; identical to SEQ ID NO: 21852
  Description of Artificial Sequence: Synthetic polypeptide
  VH of XENP019357

SEQ ID NO: 21863 - protein, 5 aa, Artificial Sequence
  Description of Artificial Sequence: Synthetic peptide
  XENP019357 vhCDR1
NYGMN

SEQ ID NO: 21864 - protein, 17 aa, Artificial Sequence
  Description of Artificial Sequence: Synthetic peptide
  XENP019357 vhCDR2
WINTYTGEPTYADGFTG

SEQ ID NO: 21865 - protein, 9 aa, Artificial Sequence
  Description of Artificial Sequence: Synthetic peptide
  XENP019357 vhCDR3
GRGMGYFDY

SEQ ID NO: 21866 - protein, 214 aa, Artificial Sequence; identical to SEQ ID NO: 21846
  Description of Artificial Sequence: Synthetic polypeptide
  XENP019357 1H11_H2L2_IgG1_PVA_/S267K Light Chain

SEQ ID NO: 21867 - protein, 107 aa, Artificial Sequence; identical to SEQ ID NO: 21847
  Description of Artificial Sequence: Synthetic polypeptide
  VL of XENP019357

SEQ ID NO: 21868 - protein, 11 aa, Artificial Sequence
  Description of Artificial Sequence: Synthetic peptide
  XENP019357 vlCDR1
RASENIYSNLA

SEQ ID NO: 21869 - protein, 7 aa, Artificial Sequence
  Description of Artificial Sequence: Synthetic peptide
  XENP019357 vlCDR2
AATNLAD

SEQ ID NO: 21870 - protein, 9 aa, Artificial Sequence
  Description of Artificial Sequence: Synthetic peptide
  XENP019357 vlCDR3
QHFWTTPRT

SEQ ID NO: 21871 - protein, 450 aa, Artificial Sequence
  Description of Artificial Sequence: Synthetic polypeptide
  XENP019358 3C11_H1L1_IgG1_PVA_/S267K Heavy Chain
QVQLQESGPGLVKPSETLSLTCTVSGYSITSDYAWNWIRQPPGKKLEWIGYISYSSTSYNPSLKSRVTISRDTSKNQFSLKLSSVTAADTAVYFCARNNLLWSYYYAMDYWGQGTLVTVSSASTKGPSVFPLAPSSKSTSGGTAALGCLVKDYFPEPVTVSWNSGALTSGVHTFPAVLQSSGLYSLSSVVTVPSSSLGTQTYICNVNHKPSDTKVDKKVEPKSCDKTHTCPPCPAPPVAGPSVFLFPPKPKDTLMISRTPEVTCVVVDVKHEDPEVKFNWYVDGVEVHNAKTKPREEEYNSTYRVVSVLTVLHQDWLNGKEYKCKVSNKALPAPIEKTISKAKGQPREPQVYTLPPSREEMTKNQVSLTCDVSGFYPSDIAVEWESDGQPENNYKTTPPVLDSDGSFFLYSKLTVDKSRWEQGDVFSCSVMHEALHNHYTQKSLSLSPGK

SEQ ID NO: 21872 - protein, 121 aa, Artificial Sequence
  Description of Artificial Sequence: Synthetic polypeptide
  VH of XENP019358
QVQLQESGPGLVKPSETLSLTCTVSGYSITSDYAWNWIRQPPGKKLEWIGYISYSSTSYNPSLKSRVTISRDTSKNQFSLKLSSVTAADTAVYFCARNNLLWSYYYAMDYWGQGTLVTVSS

SEQ ID NO: 21873 - protein, 6 aa, Artificial Sequence
  Description of Artificial Sequence: Synthetic peptide
  XENP019358 vhCDR1
SDYAWN

SEQ ID NO: 21874 - protein, 15 aa, Artificial Sequence
  Description of Artificial Sequence: Synthetic peptide
  XENP019358 vhCDR2
YISYSSTSYNPSLKS

SEQ ID NO: 21875 - protein, 13 aa, Artificial Sequence
  Description of Artificial Sequence: Synthetic peptide
  XENP019358 vhCDR3
NNLLWSYYYAMDY

SEQ ID NO: 21876 - protein, 218 aa, Artificial Sequence
  Description of Artificial Sequence: Synthetic polypeptide
  XENP019358 3C11_H1L1_IgG1_PVA_/S267K Light Chain
DIVLTQSPATLSLSPGERATLSCRASESVDSYGNSFMHWYQQKPGQPPRLLIYRASNLESGIPARFSGSGSGTDFTLTISSLEPEDFAVYYCQQSNEDPYTFGGGTKVEIKRTVAAPSVFIFPPSDEQLKSGTASVVCLLNNFYPREAKVQWKVDNALQSGNSQESVTEQDSKDSTYSLSSTLTLSKADYEKHKVYACEVTHQGLSSPVTKSFNRGEC

SEQ ID NO: 21877 - protein, 111 aa, Artificial Sequence
  Description of Artificial Sequence: Synthetic polypeptide
  VL of XENP019358
DIVLTQSPATLSLSPGERATLSCRASESVDSYGNSFMHWYQQKPGQPPRLLIYRASNLESGIPARFSGSGSGTDFTLTISSLEPEDFAVYYCQQSNEDPYTFGGGTKVEIK

SEQ ID NO: 21878 - protein, 15 aa, Artificial Sequence
  Description of Artificial Sequence: Synthetic peptide
  XENP019358 vlCDR1
RASESVDSYGNSFMH

SEQ ID NO: 21879 - protein, 7 aa, Artificial Sequence
  Description of Artificial Sequence: Synthetic peptide
  XENP019358 vlCDR2
RASNLES

SEQ ID NO: 21880 - protein, 9 aa, Artificial Sequence
  Description of Artificial Sequence: Synthetic peptide
  XENP019358 vlCDR3
QQSNEDPYT

SEQ ID NO: 21881 - protein, 447 aa, Artificial Sequence; identical to SEQ ID NO: 21831
  Description of Artificial Sequence: Synthetic polypeptide
  XENP019359 1H11_H1_5D8_L1_IgG1_PVA_/S267K Heavy Chain

SEQ ID NO: 21882 - protein, 118 aa, Artificial Sequence; identical to SEQ ID NO: 21832
  Description of Artificial Sequence: Synthetic polypeptide
  VH of XENP019359

SEQ ID NO: 21883 - protein, 5 aa, Artificial Sequence
  Description of Artificial Sequence: Synthetic peptide
  XENP019359 vhCDR1
NYGMN

SEQ ID NO: 21884 - protein, 17 aa, Artificial Sequence
  Description of Artificial Sequence: Synthetic peptide
  XENP019359 vhCDR2
WINTYTGEPTYADKFQG

SEQ ID NO: 21885 - protein, 9 aa, Artificial Sequence
  Description of Artificial Sequence: Synthetic peptide
  XENP019359 vhCDR3
GRGMGYFDY

SEQ ID NO: 21886 - protein, 214 aa, Artificial Sequence
  Description of Artificial Sequence: Synthetic polypeptide
  XENP019359 1H11_H1_5D8_L1_IgG1_PVA_/S267K Light Chain
DIQMTQSPSSLSASVGDRVTITCRASENIYSNLAWYQQKPGKSPKLLVYAATNLGDGVPSRFSGSGSGTDYTLTISSLQPEDFATYYCQHFWATPRTFGGGTKVEIKRTVAAPSVFIFPPSDEQLKSGTASVVCLLNNFYPREAKVQWKVDNALQSGNSQESVTEQDSKDSTYSLSSTLTLSKADYEKHKVYACEVTHQGLSSPVTKSFNRGEC

SEQ ID NO: 21887 - protein, 107 aa, Artificial Sequence
  Description of Artificial Sequence: Synthetic polypeptide
  VL of XENP019359
DIQMTQSPSSLSASVGDRVTITCRASENIYSNLAWYQQKPGKSPKLLVYAATNLGDGVPSRFSGSGSGTDYTLTISSLQPEDFATYYCQHFWATPRTFGGGTKVEIK

SEQ ID NO: 21888 - protein, 11 aa, Artificial Sequence
  Description of Artificial Sequence: Synthetic peptide
  XENP019359 vlCDR1
RASENIYSNLA

SEQ ID NO: 21889 - protein, 7 aa, Artificial Sequence
  Description of Artificial Sequence: Synthetic peptide
  XENP019359 vlCDR2
AATNLGD

SEQ ID NO: 21890 - protein, 9 aa, Artificial Sequence
  Description of Artificial Sequence: Synthetic peptide
  XENP019359 vlCDR3
QHFWATPRT

SEQ ID NO: 21891 - protein, 444 aa, Artificial Sequence
  Description of Artificial Sequence: Synthetic polypeptide
  XENP019360 8D7_H1L1_IgG1_PVA_/S267K Heavy Chain
QVTLKESGPVLVKPTETLTLTCTVSGFSLSSYGVHWVRQPPGKGLEWLAVIWSGSTDYNPSLKSRLTISKDNSKSQVVLTMTNMDPVDTATYYCARTYYYAMDYWGQGTLVTVSSASTKGPSVFPLAPSSKSTSGGTAALGCLVKDYFPEPVTVSWNSGALTSGVHTFPAVLQSSGLYSLSSVVTVPSSSLGTQTYICNVNHKPSDTKVDKKVEPKSCDKTHTCPPCPAPPVAGPSVFLFPPKPKDTLMISRTPEVTCVVVDVKHEDPEVKFNWYVDGVEVHNAKTKPREEEYNSTYRVVSVLTVLHQDWLNGKEYKCKVSNKALPAPIEKTISKAKGQPREPQVYTLPPSREEMTKNQVSLTCDVSGFYPSDIAVEWESDGQPENNYKTTPPVLDSDGSFFLYSKLTVDKSRWEQGDVFSCSVMHEALHNHYTQKSLSLSPGK

SEQ ID NO: 21892 - protein, 115 aa, Artificial Sequence
  Description of Artificial Sequence: Synthetic polypeptide
  VH of XENP019360
QVTLKESGPVLVKPTETLTLTCTVSGFSLSSYGVHWVRQPPGKGLEWLAVIWSGSTDYNPSLKSRLTISKDNSKSQVVLTMTNMDPVDTATYYCARTYYYAMDYWGQGTLVTVSS

SEQ ID NO: 21893 - protein, 5 aa, Artificial Sequence
  Description of Artificial Sequence: Synthetic peptide
  XENP019360 vhCDR1
SYGVH

SEQ ID NO: 21894 - protein, 15 aa, Artificial Sequence
  Description of Artificial Sequence: Synthetic peptide
  XENP019360 vhCDR2
VIWSGSTDYNPSLKS

SEQ ID NO: 21895 - protein, 8 aa, Artificial Sequence
  Description of Artificial Sequence: Synthetic peptide
  XENP019360 vhCDR3
TYYYAMDY

SEQ ID NO: 21896 - protein, 214 aa, Artificial Sequence
  Description of Artificial Sequence: Synthetic polypeptide
  XENP019360 8D7_H1L1_IgG1_PVA_/S267K Light Chain
DIQMTQSPSSLSASVGDRVTITCRASENIYSNLAWYQQKPGKSPKFLIYAATNLADGVPSRFSGSGSGTDYTLTISSLQPEDFATYYCQHFWGTPWTFGGGTKVEIKRTVAAPSVFIFPPSDEQLKSGTASVVCLLNNFYPREAKVQWKVDNALQSGNSQESVTEQDSKDSTYSLSSTLTLSKADYEKHKVYACEVTHQGLSSPVTKSFNRGEC

SEQ ID NO: 21897 - protein, 107 aa, Artificial Sequence
  Description of Artificial Sequence: Synthetic polypeptide
  VL of XENP019360
DIQMTQSPSSLSASVGDRVTITCRASENIYSNLAWYQQKPGKSPKFLIYAATNLADGVPSRFSGSGSGTDYTLTISSLQPEDFATYYCQHFWGTPWTFGGGTKVEIK

SEQ ID NO: 21898 - protein, 11 aa, Artificial Sequence
  Description of Artificial Sequence: Synthetic peptide
  XENP019360 vlCDR1
RASENIYSNLA

SEQ ID NO: 21899 - protein, 7 aa, Artificial Sequence
  Description of Artificial Sequence: Synthetic peptide
  XENP019360 vlCDR2
AATNLAD

SEQ ID NO: 21900 - protein, 9 aa, Artificial Sequence
  Description of Artificial Sequence: Synthetic peptide
  XENP019360 vlCDR3
QHFWGTPWT

SEQ ID NO: 21901 - protein, 447 aa, Artificial Sequence
  Description of Artificial Sequence: Synthetic polypeptide
  XENP019361 2A11_H0L0_IgG1_PVA_/S267K Heavy Chain
EVQLQQSGAELVRSGASVKLSCTASGFNIKDYYMHWVKQRPEQGLEWIGWIDPENGDTEYAPKFQGKATMTADTSSNTAYLQLSSLTSEDTAVYYCYARGVRQALDYWGQGTSVTVSSASTKGPSVFPLAPSSKSTSGGTAALGCLVKDYFPEPVTVSWNSGALTSGVHTFPAVLQSSGLYSLSSVVTVPSSSLGTQTYICNVNHKPSDTKVDKKVEPKSCDKTHTCPPCPAPPVAGPSVFLFPPKPKDTLMISRTPEVTCVVVDVKHEDPEVKFNWYVDGVEVHNAKTKPREEEYNSTYRVVSVLTVLHQDWLNGKEYKCKVSNKALPAPIEKTISKAKGQPREPQVYTLPPSREEMTKNQVSLTCDVSGFYPSDIAVEWESDGQPENNYKTTPPVLDSDGSFFLYSKLTVDKSRWEQGDVFSCSVMHEALHNHYTQKSLSLSPGK

SEQ ID NO: 21902 - protein, 118 aa, Artificial Sequence
  Description of Artificial Sequence: Synthetic polypeptide
  VH of XENP019361
EVQLQQSGAELVRSGASVKLSCTASGFNIKDYYMHWVKQRPEQGLEWIGWIDPENGDTEYAPKFQGKATMTADTSSNTAYLQLSSLTSEDTAVYYCYARGVRQALDYWGQGTSVTVSS

SEQ ID NO: 21903 - protein, 5 aa, Artificial Sequence
  Description of Artificial Sequence: Synthetic peptide
  XENP019361 vhCDR1
DYYMH

SEQ ID NO: 21904 - protein, 17 aa, Artificial Sequence
  Description of Artificial Sequence: Synthetic peptide
  XENP019361 vhCDR2
WIDPENGDTEYAPKFQG

SEQ ID NO: 21905 - protein, 9 aa, Artificial Sequence
  Description of Artificial Sequence: Synthetic peptide
  XENP019361 vhCDR3
RGVRQALDY

SEQ ID NO: 21906 - protein, 214 aa, Artificial Sequence
  Description of Artificial Sequence: Synthetic polypeptide
  XENP019361 2A11_H0L0_IgG1_PVA_/S267K Light Chain
DIQMTQTTSSLSASLGDRVTISCRASQDIGNYLNWFQQKPDGTVKLLIYYTSRLHSGVPSRFSGSGSGTDYSLTISNLEQEDIATYFCQQGNTLPYTFGGGTKLEIKRTVAAPSVFIFPPSDEQLKSGTASVVCLLNNFYPREAKVQWKVDNALQSGNSQESVTEQDSKDSTYSLSSTLTLSKADYEKHKVYACEVTHQGLSSPVTKSFNRGEC

SEQ ID NO: 21907 - protein, 107 aa, Artificial Sequence
  Description of Artificial Sequence: Synthetic polypeptide
  VL of XENP019361
DIQMTQTTSSLSASLGDRVTISCRASQDIGNYLNWFQQKPDGTVKLLIYYTSRLHSGVPSRFSGSGSGTDYSLTISNLEQEDIATYFCQQGNTLPYTFGGGTKLEIK

SEQ ID NO: 21908 - protein, 11 aa, Artificial Sequence
  Description of Artificial Sequence: Synthetic peptide
  XENP019361 vlCDR1
RASQDIGNYLN

SEQ ID NO: 21909 - protein, 7 aa, Artificial Sequence
  Description of Artificial Sequence: Synthetic peptide
  XENP019361 vlCDR2
YTSRLHS

SEQ ID NO: 21910 - protein, 9 aa, Artificial Sequence
  Description of Artificial Sequence: Synthetic peptide
  XENP019361 vlCDR3
QQGNTLPYT

SEQ ID NO: 21911 - protein, 447 aa, Artificial Sequence; identical to SEQ ID NO: 2885
  Description of Artificial Sequence: Synthetic polypeptide
  XENP019362 2A11_H1L1_IgG1_PVA_/S267K Heavy Chain

SEQ ID NO: 21912 - protein, 118 aa, Artificial Sequence; identical to SEQ ID NO: 2686
  Description of Artificial Sequence: Synthetic polypeptide
  VH of XENP019362

SEQ ID NO: 21913 - protein, 5 aa, Artificial Sequence
  Description of Artificial Sequence: Synthetic peptide
  XENP019362 vhCDR1
DYYMH

SEQ ID NO: 21914 - protein, 17 aa, Artificial Sequence
  Description of Artificial Sequence: Synthetic peptide
  XENP019362 vhCDR2
WIDPENGDTEYAPKFQG

SEQ ID NO: 21915 - protein, 9 aa, Artificial Sequence
  Description of Artificial Sequence: Synthetic peptide
  XENP019362 vhCDR3
RGVRQALDY

SEQ ID NO: 21916 - protein, 214 aa, Artificial Sequence
  Description of Artificial Sequence: Synthetic polypeptide
  XENP019362 2A11_H1L1_IgG1_PVA_/S267K Light Chain
DIQMTQSPSSLSASVGDRVTITCRASQDIGNYLNWFQQKPGKTVKLLIYYTSRLHSGVPSRFSGSGSGTDYTLTISSLQPEDFATYFCQQGNTLPYTFGGGTKVEIKRTVAAPSVFIFPPSDEQLKSGTASVVCLLNNFYPREAKVQWKVDNALQSGNSQESVTEQDSKDSTYSLSSTLTLSKADYEKHKVYACEVTHQGLSSPVTKSFNRGEC

SEQ ID NO: 21917 - protein, 107 aa, Artificial Sequence
  Description of Artificial Sequence: Synthetic polypeptide
  VL of XENP019362
DIQMTQSPSSLSASVGDRVTITCRASQDIGNYLNWFQQKPGKTVKLLIYYTSRLHSGVPSRFSGSGSGTDYTLTISSLQPEDFATYFCQQGNTLPYTFGGGTKVEIK

SEQ ID NO: 21918 - protein, 11 aa, Artificial Sequence
  Description of Artificial Sequence: Synthetic peptide
  XENP019362 vlCDR1
RASQDIGNYLN

SEQ ID NO: 21919 - protein, 7 aa, Artificial Sequence
  Description of Artificial Sequence: Synthetic peptide
  XENP019362 vlCDR2
YTSRLHS

SEQ ID NO: 21920 - protein, 9 aa, Artificial Sequence
  Description of Artificial Sequence: Synthetic peptide
  XENP019362 vlCDR3
QQGNTLPYT

SEQ ID NO: 21921 - protein, 447 aa, Artificial Sequence; identical to SEQ ID NO: 2885
  Description of Artificial Sequence: Synthetic polypeptide
  XENP019363 2A11_H1L2_IgG1_PVA_/S267K Heavy Chain

SEQ ID NO: 21922 - protein, 118 aa, Artificial Sequence; identical to SEQ ID NO: 2686
  Description of Artificial Sequence: Synthetic polypeptide
  VH of XENP019363

SEQ ID NO: 21923 - protein, 5 aa, Artificial Sequence
  Description of Artificial Sequence: Synthetic peptide
  XENP019363 vhCDR1
DYYMH

SEQ ID NO: 21924 - protein, 17 aa, Artificial Sequence
  Description of Artificial Sequence: Synthetic peptide
  XENP019363 vhCDR2
WIDPENGDTEYAPKFQG

SEQ ID NO: 21925 - protein, 9 aa, Artificial Sequence
  Description of Artificial Sequence: Synthetic peptide
  XENP019363 vhCDR3
RGVRQALDY

SEQ ID NO: 21926 - protein, 214 aa, Artificial Sequence; identical to SEQ ID NO: 2880
  Description of Artificial Sequence: Synthetic polypeptide
  XENP019363 2A11_H1L2_IgG1_PVA_/S267K Light Chain

SEQ ID NO: 21927 - protein, 107 aa, Artificial Sequence; identical to SEQ ID NO: 2881
  Description of Artificial Sequence: Synthetic polypeptide
  VL of XENP019363

SEQ ID NO: 21928 - protein, 11 aa, Artificial Sequence
  Description of Artificial Sequence: Synthetic peptide
  XENP019363 vlCDR1
QASQDIGNYLN

SEQ ID NO: 21929 - protein, 7 aa, Artificial Sequence
  Description of Artificial Sequence: Synthetic peptide
  XENP019363 vlCDR2
YTSRLHS

SEQ ID NO: 21930 - protein, 9 aa, Artificial Sequence
  Description of Artificial Sequence: Synthetic peptide
  XENP019363 vlCDR3
QQGNTLPYT

SEQ ID NO: 21931 - protein, 446 aa, Artificial Sequence
  Description of Artificial Sequence: Synthetic polypeptide
  XENP019364 2A11_H2L1_IgG1_PVA_/S267K Heavy Chain
EVQLVQSGAEVKKPGATVKISCKASGFNIKDYYMHWVQQAPGKGLEWMGWIDPENGDTEYAPKFQGRVTITADTSTNTAYMELSSLRSEDTAVYYCARGVRQALDYWGQGTLVTVSSASTKGPSVFPLAPSSKSTSGGTAALGCLVKDYFPEPVTVSWNSGALTSGVHTFPAVLQSSGLYSLSSVVTVPSSSLGTQTYICNVNHKPSDTKVDKKVEPKSCDKTHTCPPCPAPPVAGPSVFLFPPKPKDTLMISRTPEVTCVVVDVKHEDPEVKFNWYVDGVEVHNAKTKPREEEYNSTYRVVSVLTVLHQDWLNGKEYKCKVSNKALPAPIEKTISKAKGQPREPQVYTLPPSREEMTKNQVSLTCDVSGFYPSDIAVEWESDGQPENNYKTTPPVLDSDGSFFLYSKLTVDKSRWEQGDVFSCSVMHEALHNHYTQKSLSLSPGK

SEQ ID NO: 21932 - protein, 117 aa, Artificial Sequence
  Description of Artificial Sequence: Synthetic polypeptide
  VH of XENP019364
EVQLVQSGAEVKKPGATVKISCKASGFNIKDYYMHWVQQAPGKGLEWMGWIDPENGDTEYAPKFQGRVTITADTSTNTAYMELSSLRSEDTAVYYCARGVRQALDYWGQGTLVTVSS

SEQ ID NO: 21933 - protein, 5 aa, Artificial Sequence
  Description of Artificial Sequence: Synthetic peptide
  XENP019364 vhCDR1
DYYMH

SEQ ID NO: 21934 - protein, 17 aa, Artificial Sequence
  Description of Artificial Sequence: Synthetic peptide
  XENP019364 vhCDR2
WIDPENGDTEYAPKFQG

SEQ ID NO: 21935 - protein, 8 aa, Artificial Sequence
  Description of Artificial Sequence: Synthetic peptide
  XENP019364 vhCDR3
GVRQALDY

SEQ ID NO: 21936 - protein, 214 aa, Artificial Sequence; identical to SEQ ID NO: 21916
  Description of Artificial Sequence: Synthetic polypeptide
  XENP019364 2A11_H2L1_IgG1_PVA_/S267K Light Chain

SEQ ID NO: 21937 - protein, 107 aa, Artificial Sequence; identical to SEQ ID NO: 21917
  Description of Artificial Sequence: Synthetic polypeptide
  VL of XENP019364

SEQ ID NO: 21938 - protein, 11 aa, Artificial Sequence
  Description of Artificial Sequence: Synthetic peptide
  XENP019364 vlCDR1
RASQDIGNYLN

SEQ ID NO: 21939 - protein, 7 aa, Artificial Sequence
  Description of Artificial Sequence: Synthetic peptide
  XENP019364 vlCDR2
YTSRLHS

SEQ ID NO: 21940 - protein, 9 aa, Artificial Sequence
  Description of Artificial Sequence: Synthetic peptide
  XENP019364 vlCDR3
QQGNTLPYT

SEQ ID NO: 21941 - protein, 446 aa, Artificial Sequence; identical to SEQ ID NO: 21931
  Description of Artificial Sequence: Synthetic polypeptide
  XENP019365 2A11_H2L2_IgG1_PVA_/S267K Heavy Chain

SEQ ID NO: 21942 - protein, 117 aa, Artificial Sequence; identical to SEQ ID NO: 21932
  Description of Artificial Sequence: Synthetic polypeptide
  VH of XENP019365

SEQ ID NO: 21943 - protein, 5 aa, Artificial Sequence
  Description of Artificial Sequence: Synthetic peptide
  XENP019365 vhCDR1
DYYMH

SEQ ID NO: 21944 - protein, 17 aa, Artificial Sequence
  Description of Artificial Sequence: Synthetic peptide
  XENP019365 vhCDR2
WIDPENGDTEYAPKFQG

SEQ ID NO: 21945 - protein, 8 aa, Artificial Sequence
  Description of Artificial Sequence: Synthetic peptide
  XENP019365 vhCDR3
GVRQALDY

SEQ ID NO: 21946 - protein, 214 aa, Artificial Sequence; identical to SEQ ID NO: 2880
  Description of Artificial Sequence: Synthetic polypeptide
  XENP019365 2A11_H2L2_IgG1_PVA_/S267K Light Chain

SEQ ID NO: 21947 - protein, 107 aa, Artificial Sequence; identical to SEQ ID NO: 2881
  Description of Artificial Sequence: Synthetic polypeptide
  VL of XENP019365

SEQ ID NO: 21948 - protein, 11 aa, Artificial Sequence
  Description of Artificial Sequence: Synthetic peptide
  XENP019365 vlCDR1
QASQDIGNYLN

SEQ ID NO: 21949 - protein, 7 aa, Artificial Sequence
  Description of Artificial Sequence: Synthetic peptide
  XENP019365 vlCDR2
YTSRLHS

SEQ ID NO: 21950 - protein, 9 aa, Artificial Sequence
  Description of Artificial Sequence: Synthetic peptide
  XENP019365 vlCDR3
QQGNTLPYT

SEQ ID NO: 21951 - protein, 447 aa, Artificial Sequence
  Description of Artificial Sequence: Synthetic polypeptide
  XENP019366 2A11_H3L1_IgG1_PVA_/S267K Heavy Chain
EVQLVESGGGVVQPGGSLRLSCAASGFNIKDYYMHWVRQAPGKGLEWVSWIDPENGDTEYAPSVKGRFTISADTSKNSAYLQMNSLRTEDTALYYCYARGVRQALDYWGQGTLVTVSSASTKGPSVFPLAPSSKSTSGGTAALGCLVKDYFPEPVTVSWNSGALTSGVHTFPAVLQSSGLYSLSSVVTVPSSSLGTQTYICNVNHKPSDTKVDKKVEPKSCDKTHTCPPCPAPPVAGPSVFLFPPKPKDTLMISRTPEVTCVVVDVKHEDPEVKFNWYVDGVEVHNAKTKPREEEYNSTYRVVSVLTVLHQDWLNGKEYKCKVSNKALPAPIEKTISKAKGQPREPQVYTLPPSREEMTKNQVSLTCDVSGFYPSDIAVEWESDGQPENNYKTTPPVLDSDGSFFLYSKLTVDKSRWEQGDVFSCSVMHEALHNHYTQKSLSLSPGK

SEQ ID NO: 21952 - protein, 118 aa, Artificial Sequence
  Description of Artificial Sequence: Synthetic polypeptide
  VH of XENP019366
EVQLVESGGGVVQPGGSLRLSCAASGFNIKDYYMHWVRQAPGKGLEWVSWIDPENGDTEYAPSVKGRFTISADTSKNSAYLQMNSLRTEDTALYYCYARGVRQALDYWGQGTLVTVSS

SEQ ID NO: 21953 - protein, 5 aa, Artificial Sequence
  Description of Artificial Sequence: Synthetic peptide
  XENP019366 vhCDR1
DYYMH

SEQ ID NO: 21954 - protein, 17 aa, Artificial Sequence
  Description of Artificial Sequence: Synthetic peptide
  XENP019366 vhCDR2
WIDPENGDTEYAPSVKG

SEQ ID NO: 21955 - protein, 9 aa, Artificial Sequence
  Description of Artificial Sequence: Synthetic peptide
  XENP019366 vhCDR3
RGVRQALDY

SEQ ID NO: 21956 - protein, 214 aa, Artificial Sequence; identical to SEQ ID NO: 21916
  Description of Artificial Sequence: Synthetic polypeptide
  XENP019366 2A11_H3L1_IgG1_PVA_/S267K Light Chain

SEQ ID NO: 21957 - protein, 107 aa, Artificial Sequence; identical to SEQ ID NO: 21917
  Description of Artificial Sequence: Synthetic polypeptide
  VL of XENP019366

SEQ ID NO: 21958 - protein, 11 aa, Artificial Sequence
  Description of Artificial Sequence: Synthetic peptide
  XENP019366 vlCDR1
RASQDIGNYLN

SEQ ID NO: 21959 - protein, 7 aa, Artificial Sequence
  Description of Artificial Sequence: Synthetic peptide
  XENP019366 vlCDR2
YTSRLHS

SEQ ID NO: 21960 - protein, 9 aa, Artificial Sequence
  Description of Artificial Sequence: Synthetic peptide
  XENP019366 vlCDR3
QQGNTLPYT

SEQ ID NO: 21961 - protein, 447 aa, Artificial Sequence; identical to SEQ ID NO: 21951
  Description of Artificial Sequence: Synthetic polypeptide
  XENP019367 2A11_H3L2_IgG1_PVA_/S267K Heavy Chain

SEQ ID NO: 21962 - protein, 118 aa, Artificial Sequence; identical to SEQ ID NO: 21952
  Description of Artificial Sequence: Synthetic polypeptide
  VH of XENP019367

SEQ ID NO: 21963 - protein, 5 aa, Artificial Sequence
  Description of Artificial Sequence: Synthetic peptide
  XENP019367 vhCDR1
DYYMH

SEQ ID NO: 21964 - protein, 17 aa, Artificial Sequence
  Description of Artificial Sequence: Synthetic peptide
  XENP019367 vhCDR2
WIDPENGDTEYAPSVKG

SEQ ID NO: 21965 - protein, 9 aa, Artificial Sequence
  Description of Artificial Sequence: Synthetic peptide
  XENP019367 vhCDR3
RGVRQALDY

SEQ ID NO: 21966 - protein, 214 aa, Artificial Sequence; identical to SEQ ID NO: 2880
  Description of Artificial Sequence: Synthetic polypeptide
  XENP019367 2A11_H3L2_IgG1_PVA_/S267K Light Chain

SEQ ID NO: 21967 - protein, 107 aa, Artificial Sequence; identical to SEQ ID NO: 2881
  Description of Artificial Sequence: Synthetic polypeptide
  VL of XENP019367

SEQ ID NO: 21968 - protein, 11 aa, Artificial Sequence
  Description of Artificial Sequence: Synthetic peptide
  XENP019367 vlCDR1
QASQDIGNYLN

SEQ ID NO: 21969 - protein, 7 aa, Artificial Sequence
  Description of Artificial Sequence: Synthetic peptide
  XENP019367 vlCDR2
YTSRLHS

SEQ ID NO: 21970 - protein, 9 aa, Artificial Sequence
  Description of Artificial Sequence: Synthetic peptide
  XENP019367 vlCDR3
QQGNTLPYT

SEQ ID NO: 21971 - protein, 446 aa, Artificial Sequence
  Description of Artificial Sequence: Synthetic polypeptide
  XENP019368 2A11_H4L1_IgG1_PVA_/S267K Heavy Chain
EVQLVESGGGVVQPGGSLRLSCAASGFNIKDYYMHWVRQAPGKGLEWVSWIDPENGDTEYAPSVKGRFTISADTSKNSAYLQMNSLRTEDTALYYCARGVRQALDYWGQGTLVTVSSASTKGPSVFPLAPSSKSTSGGTAALGCLVKDYFPEPVTVSWNSGALTSGVHTFPAVLQSSGLYSLSSVVTVPSSSLGTQTYICNVNHKPSDTKVDKKVEPKSCDKTHTCPPCPAPPVAGPSVFLFPPKPKDTLMISRTPEVTCVVVDVKHEDPEVKFNWYVDGVEVHNAKTKPREEEYNSTYRVVSVLTVLHQDWLNGKEYKCKVSNKALPAPIEKTISKAKGQPREPQVYTLPPSREEMTKNQVSLTCDVSGFYPSDIAVEWESDGQPENNYKTTPPVLDSDGSFFLYSKLTVDKSRWEQGDVFSCSVMHEALHNHYTQKSLSLSPGK

SEQ ID NO: 21972 - protein, 117 aa, Artificial Sequence
  Description of Artificial Sequence: Synthetic polypeptide
  VH of XENP019368
EVQLVESGGGVVQPGGSLRLSCAASGFNIKDYYMHWVRQAPGKGLEWVSWIDPENGDTEYAPSVKGRFTISADTSKNSAYLQMNSLRTEDTALYYCARGVRQALDYWGQGTLVTVSS

SEQ ID NO: 21973 - protein, 5 aa, Artificial Sequence
  Description of Artificial Sequence: Synthetic peptide
  XENP019368 vhCDR1
DYYMH

SEQ ID NO: 21974 - protein, 17 aa, Artificial Sequence
  Description of Artificial Sequence: Synthetic peptide
  XENP019368 vhCDR2
WIDPENGDTEYAPSVKG

SEQ ID NO: 21975 - protein, 8 aa, Artificial Sequence
  Description of Artificial Sequence: Synthetic peptide
  XENP019368 vhCDR3
GVRQALDY

SEQ ID NO: 21976 - protein, 214 aa, Artificial Sequence; identical to SEQ ID NO: 21916
  Description of Artificial Sequence: Synthetic polypeptide
  XENP019368 2A11_H4L1_IgG1_PVA_/S267K Light Chain

SEQ ID NO: 21977 - protein, 107 aa, Artificial Sequence; identical to SEQ ID NO: 21917
  Description of Artificial Sequence: Synthetic polypeptide
  VL of XENP019368

SEQ ID NO: 21978 - protein, 11 aa, Artificial Sequence
  Description of Artificial Sequence: Synthetic peptide
  XENP019368 vlCDR1
RASQDIGNYLN

SEQ ID NO: 21979 - protein, 7 aa, Artificial Sequence
  Description of Artificial Sequence: Synthetic peptide
  XENP019368 vlCDR2
YTSRLHS

SEQ ID NO: 21980 - protein, 9 aa, Artificial Sequence
  Description of Artificial Sequence: Synthetic peptide
  XENP019368 vlCDR3
QQGNTLPYT

SEQ ID NO: 21981 - protein, 446 aa, Artificial Sequence; identical to SEQ ID NO: 21971
  Description of Artificial Sequence: Synthetic polypeptide
  XENP019369 2A11_H4L2_IgG1_PVA_/S267K Heavy Chain

SEQ ID NO: 21982 - protein, 117 aa, Artificial Sequence; identical to SEQ ID NO: 21972
  Description of Artificial Sequence: Synthetic polypeptide
  VH of XENP019369

SEQ ID NO: 21983 - protein, 5 aa, Artificial Sequence
  Description of Artificial Sequence: Synthetic peptide
  XENP019369 vhCDR1
DYYMH

SEQ ID NO: 21984 - protein, 17 aa, Artificial Sequence
  Description of Artificial Sequence: Synthetic peptide
  XENP019369 vhCDR2
WIDPENGDTEYAPSVKG

SEQ ID NO: 21985 - protein, 8 aa, Artificial Sequence
  Description of Artificial Sequence: Synthetic peptide
  XENP019369 vhCDR3
GVRQALDY

SEQ ID NO: 21986 - protein, 214 aa, Artificial Sequence; identical to SEQ ID NO: 2880
  Description of Artificial Sequence: Synthetic polypeptide
  XENP019369 2A11_H4L2_IgG1_PVA_/S267K Light Chain

SEQ ID NO: 21987 - protein, 107 aa, Artificial Sequence; identical to SEQ ID NO: 2881
  Description of Artificial Sequence: Synthetic polypeptide
  VL of XENP019369

SEQ ID NO: 21988 - protein, 11 aa, Artificial Sequence
  Description of Artificial Sequence: Synthetic peptide
  XENP019369 vlCDR1
QASQDIGNYLN

SEQ ID NO: 21989 - protein, 7 aa, Artificial Sequence
  Description of Artificial Sequence: Synthetic peptide
  XENP019369 vlCDR2
YTSRLHS

SEQ ID NO: 21990 - protein, 9 aa, Artificial Sequence
  Description of Artificial Sequence: Synthetic peptide
  XENP019369 vlCDR3
QQGNTLPYT

SEQ ID NO: 21991 - protein, 445 aa, Artificial Sequence
  Description of Artificial Sequence: Synthetic polypeptide
  XENP019370 3F9_H1_7A6_L2_IgG1_PVA_/S267K Heavy Chain
QVQLQESGPGLVKPSQTLSLTCTVSDFSITSAYYWNWIRQPPGKKLEWIGYISYDSNYYNPSLKSRVTISRDTSKNQFSLKLSSVTAADTAVYYCARGGITTFDYWGQGTLVTVSSASTKGPSVFPLAPSSKSTSGGTAALGCLVKDYFPEPVTVSWNSGALTSGVHTFPAVLQSSGLYSLSSVVTVPSSSLGTQTYICNVNHKPSDTKVDKKVEPKSCDKTHTCPPCPAPPVAGPSVFLFPPKPKDTLMISRTPEVTCVVVDVKHEDPEVKFNWYVDGVEVHNAKTKPREEEYNSTYRVVSVLTVLHQDWLNGKEYKCKVSNKALPAPIEKTISKAKGQPREPQVYTLPPSREEMTKNQVSLTCDVSGFYPSDIAVEWESDGQPENNYKTTPPVLDSDGSFFLYSKLTVDKSRWEQGDVFSCSVMHEALHNHYTQKSLSLSPGK

SEQ ID NO: 21992 - protein, 116 aa, Artificial Sequence
  Description of Artificial Sequence: Synthetic polypeptide
  VH of XENP019370
QVQLQESGPGLVKPSQTLSLTCTVSDFSITSAYYWNWIRQPPGKKLEWIGYISYDSNYYNPSLKSRVTISRDTSKNQFSLKLSSVTAADTAVYYCARGGITTFDYWGQGTLVTVSS

SEQ ID NO: 21993 - protein, 6 aa, Artificial Sequence
  Description of Artificial Sequence: Synthetic peptide
  XENP019370 vhCDR1
SAYYWN

SEQ ID NO: 21994 - protein, 15 aa, Artificial Sequence
  Description of Artificial Sequence: Synthetic peptide
  XENP019370 vhCDR2
YISYDSNYYNPSLKS

SEQ ID NO: 21995 - protein, 8 aa, Artificial Sequence
  Description of Artificial Sequence: Synthetic peptide
  XENP019370 vhCDR3
GGITTFDY

SEQ ID NO: 21996 - protein, 218 aa, Artificial Sequence
  Description of Artificial Sequence: Synthetic polypeptide
  XENP019370 3F9_H1_7A6_L2_IgG1_PVA_/S267K Light Chain
DIVLTQSPATLSLSPGERATLSCRASQSVDYDGDSYMNWYQQKPGQPPRLLIYAASNLESGIPARFSGSGSGTDFTLTISSLEPEDFAVYYCQQSNEDPRTFGGGTKVEIKRTVAAPSVFIFPPSDEQLKSGTASVVCLLNNFYPREAKVQWKVDNALQSGNSQESVTEQDSKDSTYSLSSTLTLSKADYEKHKVYACEVTHQGLSSPVTKSFNRGEC

SEQ ID NO: 21997 - protein, 111 aa, Artificial Sequence
  Description of Artificial Sequence: Synthetic polypeptide
  VL of XENP019370
DIVLTQSPATLSLSPGERATLSCRASQSVDYDGDSYMNWYQQKPGQPPRLLIYAASNLESGIPARFSGSGSGTDFTLTISSLEPEDFAVYYCQQSNEDPRTFGGGTKVEIK

SEQ ID NO: 21998 - protein, 15 aa, Artificial Sequence
  Description of Artificial Sequence: Synthetic peptide
  XENP019370 vlCDR1
RASQSVDYDGDSYMN

SEQ ID NO: 21999 - protein, 7 aa, Artificial Sequence
  Description of Artificial Sequence: Synthetic peptide
  XENP019370 vlCDR2
AASNLES

SEQ ID NO: 22000 - protein, 9 aa, Artificial Sequence
  Description of Artificial Sequence: Synthetic peptide
  XENP019370 vlCDR3
QQSNEDPRT

SEQ ID NO: 22001 - protein, 444 aa, Artificial Sequence
  Description of Artificial Sequence: Synthetic polypeptide
  XENP019371 6A6_H1L1_IgG1_PVA_/S267K Heavy Chain
EVQLVQSGAEVKKPGATVKISCKASGFNIKDYYMHWVQQAPGKGLEWMGWIDPENGDTEYAPKFQGRVTITADTSTNTAYMELSSLRSEDTAVYYCARAAAMDYWGQGTLVTVSSASTKGPSVFPLAPSSKSTSGGTAALGCLVKDYFPEPVTVSWNSGALTSGVHTFPAVLQSSGLYSLSSVVTVPSSSLGTQTYICNVNHKPSDTKVDKKVEPKSCDKTHTCPPCPAPPVAGPSVFLFPPKPKDTLMISRTPEVTCVVVDVKHEDPEVKFNWYVDGVEVHNAKTKPREEEYNSTYRVVSVLTVLHQDWLNGKEYKCKVSNKALPAPIEKTISKAKGQPREPQVYTLPPSREEMTKNQVSLTCDVSGFYPSDIAVEWESDGQPENNYKTTPPVLDSDGSFFLYSKLTVDKSRWEQGDVFSCSVMHEALHNHYTQKSLSLSPGK

SEQ ID NO: 22002 - protein, 115 aa, Artificial Sequence
  Description of Artificial Sequence: Synthetic polypeptide
  VH of XENP019371
EVQLVQSGAEVKKPGATVKISCKASGFNIKDYYMHWVQQAPGKGLEWMGWIDPENGDTEYAPKFQGRVTITADTSTNTAYMELSSLRSEDTAVYYCARAAAMDYWGQGTLVTVSS

SEQ ID NO: 22003 - protein, 5 aa, Artificial Sequence
  Description of Artificial Sequence: Synthetic peptide
  XENP019371 vhCDR1
DYYMH

SEQ ID NO: 22004 - protein, 17 aa, Artificial Sequence
  Description of Artificial Sequence: Synthetic peptide
  XENP019371 vhCDR2
WIDPENGDTEYAPKFQG

SEQ ID NO: 22005 - protein, 6 aa, Artificial Sequence
  Description of Artificial Sequence: Synthetic peptide
  XENP019371 vhCDR3
AAAMDY

SEQ ID NO: 22006 - protein, 214 aa, Artificial Sequence
  Description of Artificial Sequence: Synthetic polypeptide
  XENP019371 6A6_H1L1_IgG1_PVA_/S267K Light Chain
DIQMTQSPSSLSASVGDRVTITCRASQDISNYLNWFQQKPGKTFKLLIYYTSRLHSGVPSRFSGSGSGTDYTLTISSLQPEDFATYFCQQGNTLPYTFGGGTKVEIKRTVAAPSVFIFPPSDEQLKSGTASVVCLLNNFYPREAKVQWKVDNALQSGNSQESVTEQDSKDSTYSLSSTLTLSKADYEKHKVYACEVTHQGLSSPVTKSFNRGEC

SEQ ID NO: 22007 - protein, 107 aa, Artificial Sequence
  Description of Artificial Sequence: Synthetic polypeptide
  VL of XENP019371
DIQMTQSPSSLSASVGDRVTITCRASQDISNYLNWFQQKPGKTFKLLIYYTSRLHSGVPSRFSGSGSGTDYTLTISSLQPEDFATYFCQQGNTLPYTFGGGTKVEIK

SEQ ID NO: 22008 - protein, 11 aa, Artificial Sequence
  Description of Artificial Sequence: Synthetic peptide
  XENP019371 vlCDR1
RASQDISNYLN

SEQ ID NO: 22009 - protein, 7 aa, Artificial Sequence
  Description of Artificial Sequence: Synthetic peptide
  XENP019371 vlCDR2
YTSRLHS

SEQ ID NO: 22010 - protein, 9 aa, Artificial Sequence
  Description of Artificial Sequence: Synthetic peptide
  XENP019371 vlCDR3
QQGNTLPYT

SEQ ID NO: 22011 - protein, 444 aa, Artificial Sequence
  Description of Artificial Sequence: Synthetic polypeptide
  XENP019372 9E7_H0L0_IgG1_PVA_/S267K Heavy Chain
QVQLKQSGPGLVQPSQSLSITCTVSGFSLTRYGIHWVRQSPGKGLEWLGVIWSGVTDYNAAFISRLSISKDNSKSQVFFKLNSLQANDTAIYYCARPYYYAMDYWGQGTSVTVSSASTKGPSVFPLAPSSKSTSGGTAALGCLVKDYFPEPVTVSWNSGALTSGVHTFPAVLQSSGLYSLSSVVTVPSSSLGTQTYICNVNHKPSDTKVDKKVEPKSCDKTHTCPPCPAPPVAGPSVFLFPPKPKDTLMISRTPEVTCVVVDVKHEDPEVKFNWYVDGVEVHNAKTKPREEEYNSTYRVVSVLTVLHQDWLNGKEYKCKVSNKALPAPIEKTISKAKGQPREPQVYTLPPSREEMTKNQVSLTCDVSGFYPSDIAVEWESDGQPENNYKTTPPVLDSDGSFFLYSKLTVDKSRWEQGDVFSCSVMHEALHNHYTQKSLSLSPGK

SEQ ID NO: 22012 - protein, 115 aa, Artificial Sequence
  Description of Artificial Sequence: Synthetic polypeptide
  VH of XENP019372
QVQLKQSGPGLVQPSQSLSITCTVSGFSLTRYGIHWVRQSPGKGLEWLGVIWSGVTDYNAAFISRLSISKDNSKSQVFFKLNSLQANDTAIYYCARPYYYAMDYWGQGTSVTVSS

SEQ ID NO: 22013 - protein, 5 aa, Artificial Sequence
  Description of Artificial Sequence: Synthetic peptide
  XENP019372 vhCDR1
RYGIH

SEQ ID NO: 22014 - protein, 15 aa, Artificial Sequence
  Description of Artificial Sequence: Synthetic peptide
  XENP019372 vhCDR2
VIWSGVTDYNAAFIS

SEQ ID NO: 22015 - protein, 8 aa, Artificial Sequence
  Description of Artificial Sequence: Synthetic peptide
  XENP019372 vhCDR3
PYYYAMDY

SEQ ID NO: 22016 - protein, 214 aa, Artificial Sequence
  Description of Artificial Sequence: Synthetic polypeptide
  XENP019372 9E7_H0L0_IgG1_PVA_/S267K Light Chain
DIQMTQSPASLSVSVGETVTITCRASENIYSNLAWYQQKQGKSPQLLVYAATTLADGVPSRFSGSGSGTQYSLKINSLQSEDFGSYYCQHFWGTPWTFGGGTKLEIKRTVAAPSVFIFPPSDEQLKSGTASVVCLLNNFYPREAKVQWKVDNALQSGNSQESVTEQDSKDSTYSLSSTLTLSKADYEKHKVYACEVTHQGLSSPVTKSFNRGEC

SEQ ID NO: 22017 - protein, 107 aa, Artificial Sequence
  Description of Artificial Sequence: Synthetic polypeptide
  VL of XENP019372
DIQMTQSPASLSVSVGETVTITCRASENIYSNLAWYQQKQGKSPQLLVYAATTLADGVPSRFSGSGSGTQYSLKINSLQSEDFGSYYCQHFWGTPWTFGGGTKLEIK

SEQ ID NO: 22018 - protein, 11 aa, Artificial Sequence
  Description of Artificial Sequence: Synthetic peptide
  XENP019372 vlCDR1
RASENIYSNLA

SEQ ID NO: 22019 - protein, 7 aa, Artificial Sequence
  Description of Artificial Sequence: Synthetic peptide
  XENP019372 vlCDR2
AATTLAD

SEQ ID NO: 22020 - protein, 9 aa, Artificial Sequence
  Description of Artificial Sequence: Synthetic peptide
  XENP019372 vlCDR3
QHFWGTPWT

SEQ ID NO: 22021 - protein, 444 aa, Artificial Sequence
  Description of Artificial Sequence: Synthetic polypeptide
  XENP019373 9E7_H1L1_IgG1_PVA_/S267K Heavy Chain
QVQLVQSGAEVKKPGASVKVSCKVSGFSLTRYGIHWVRQAPGQGLEWMGVIWSGVTDYNAKFQGRVTMTKDNSKSTVYMELSSLRSEDTAVYYCARPYYYAMDYWGQGTLVTVSSASTKGPSVFPLAPSSKSTSGGTAALGCLVKDYFPEPVTVSWNSGALTSGVHTFPAVLQSSGLYSLSSVVTVPSSSLGTQTYICNVNHKPSDTKVDKKVEPKSCDKTHTCPPCPAPPVAGPSVFLFPPKPKDTLMISRTPEVTCVVVDVKHEDPEVKFNWYVDGVEVHNAKTKPREEEYNSTYRVVSVLTVLHQDWLNGKEYKCKVSNKALPAPIEKTISKAKGQPREPQVYTLPPSREEMTKNQVSLTCDVSGFYPSDIAVEWESDGQPENNYKTTPPVLDSDGSFFLYSKLTVDKSRWEQGDVFSCSVMHEALHNHYTQKSLSLSPGK

SEQ ID NO: 22022 - protein, 115 aa, Artificial Sequence
  Description of Artificial Sequence: Synthetic polypeptide
  VH of XENP019373
QVQLVQSGAEVKKPGASVKVSCKVSGFSLTRYGIHWVRQAPGQGLEWMGVIWSGVTDYNAKFQGRVTMTKDNSKSTVYMELSSLRSEDTAVYYCARPYYYAMDYWGQGTLVTVSS

SEQ ID NO: 22023 - protein, 5 aa, Artificial Sequence
  Description of Artificial Sequence: Synthetic peptide
  XENP019373 vhCDR1
RYGIH

SEQ ID NO: 22024 - protein, 15 aa, Artificial Sequence
  Description of Artificial Sequence: Synthetic peptide
  XENP019373 vhCDR2
VIWSGVTDYNAKFQG

SEQ ID NO: 22025 - protein, 8 aa, Artificial Sequence
  Description of Artificial Sequence: Synthetic peptide
  XENP019373 vhCDR3
PYYYAMDY

SEQ ID NO: 22026 - protein, 214 aa, Artificial Sequence
  Description of Artificial Sequence: Synthetic polypeptide
  XENP019373 9E7_H1L1_IgG1_PVA_/S267K Light Chain
DIQMTQSPSSLSASVGDRVTITCRASENIYSNLAWYQQKPGKSPKLLVYAATTLADGVPSRFSGSGSGTDYTLTISSLQPEDFATYYCQHFWGTPWTFGGGTKVEIKRTVAAPSVFIFPPSDEQLKSGTASVVCLLNNFYPREAKVQWKVDNALQSGNSQESVTEQDSKDSTYSLSSTLTLSKADYEKHKVYACEVTHQGLSSPVTKSFNRGEC

SEQ ID NO: 22027 - protein, 107 aa, Artificial Sequence
  Description of Artificial Sequence: Synthetic polypeptide
  VL of XENP019373
DIQMTQSPSSLSASVGDRVTITCRASENIYSNLAWYQQKPGKSPKLLVYAATTLADGVPSRFSGSGSGTDYTLTISSLQPEDFATYYCQHFWGTPWTFGGGTKVEIK

SEQ ID NO: 22028 - protein, 11 aa, Artificial Sequence
  Description of Artificial Sequence: Synthetic peptide
  XENP019373 vlCDR1
RASENIYSNLA

SEQ ID NO: 22029 - protein, 7 aa, Artificial Sequence
  Description of Artificial Sequence: Synthetic peptide
  XENP019373 vlCDR2
AATTLAD

SEQ ID NO: 22030 - protein, 9 aa, Artificial Sequence
  Description of Artificial Sequence: Synthetic peptide
  XENP019373 vlCDR3
QHFWGTPWT

SEQ ID NO: 22031 - protein, 444 aa, Artificial Sequence; identical to SEQ ID NO: 22021
  Description of Artificial Sequence: Synthetic polypeptide
  XENP019374 9E7_H1L2_IgG1_PVA_/S267K Heavy Chain

SEQ ID NO: 22032 - protein, 115 aa, Artificial Sequence; identical to SEQ ID NO: 22022
  Description of Artificial Sequence: Synthetic polypeptide
  VH of XENP019374

SEQ ID NO: 22033 - protein, 5 aa, Artificial Sequence
  Description of Artificial Sequence: Synthetic peptide
  XENP019374 vhCDR1
RYGIH

SEQ ID NO: 22034 - protein, 15 aa, Artificial Sequence
  Description of Artificial Sequence: Synthetic peptide
  XENP019374 vhCDR2
VIWSGVTDYNAKFQG

SEQ ID NO: 22035 - protein, 8 aa, Artificial Sequence
  Description of Artificial Sequence: Synthetic peptide
  XENP019374 vhCDR3
PYYYAMDY

SEQ ID NO: 22036 - protein, 214 aa, Artificial Sequence
  Description of Artificial Sequence: Synthetic polypeptide
  XENP019374 9E7_H1L2_IgG1_PVA_/S267K Light Chain
DIQMTQSPATLSVSPGERATLSCRASENIYSNLAWYQQKPGQSPRLLVYAATTLADGVPSRFSGSGSGTEYTLTISSLQSEDFAVYYCQHFWGTPWTFGGGTKVEIKRTVAAPSVFIFPPSDEQLKSGTASVVCLLNNFYPREAKVQWKVDNALQSGNSQESVTEQDSKDSTYSLSSTLTLSKADYEKHKVYACEVTHQGLSSPVTKSFNRGEC

SEQ ID NO: 22037 - protein, 107 aa, Artificial Sequence
  Description of Artificial Sequence: Synthetic polypeptide
  VL of XENP019374
DIQMTQSPATLSVSPGERATLSCRASENIYSNLAWYQQKPGQSPRLLVYAATTLADGVPSRFSGSGSGTEYTLTISSLQSEDFAVYYCQHFWGTPWTFGGGTKVEIK

SEQ ID NO: 22038 - protein, 11 aa, Artificial Sequence
  Description of Artificial Sequence: Synthetic peptide
  XENP019374 vlCDR1
RASENIYSNLA

SEQ ID NO: 22039 - protein, 7 aa, Artificial Sequence
  Description of Artificial Sequence: Synthetic peptide
  XENP019374 vlCDR2
AATTLAD

SEQ ID NO: 22040 - protein, 9 aa, Artificial Sequence
  Description of Artificial Sequence: Synthetic peptide
  XENP019374 vlCDR3
QHFWGTPWT

SEQ ID NO: 22041 - protein, 444 aa, Artificial Sequence
  Description of Artificial Sequence: Synthetic polypeptide
  XENP019375 9E7_H2L1_IgG1_PVA_/S267K Heavy Chain
QVTLKESGPVLVKPTETLTLTCTVSGFSLTRYGIHWVRQPPGKGLEWLAVIWSGVTDYNPSLKSRLTISKDNSKSQVVLTMTNMDPVDTATYYCARPYYYAMDYWGQGTLVTVSSASTKGPSVFPLAPSSKSTSGGTAALGCLVKDYFPEPVTVSWNSGALTSGVHTFPAVLQSSGLYSLSSVVTVPSSSLGTQTYICNVNHKPSDTKVDKKVEPKSCDKTHTCPPCPAPPVAGPSVFLFPPKPKDTLMISRTPEVTCVVVDVKHEDPEVKFNWYVDGVEVHNAKTKPREEEYNSTYRVVSVLTVLHQDWLNGKEYKCKVSNKALPAPIEKTISKAKGQPREPQVYTLPPSREEMTKNQVSLTCDVSGFYPSDIAVEWESDGQPENNYKTTPPVLDSDGSFFLYSKLTVDKSRWEQGDVFSCSVMHEALHNHYTQKSLSLSPGK

SEQ ID NO: 22042 - protein, 115 aa, Artificial Sequence
  Description of Artificial Sequence: Synthetic polypeptide
  VH of XENP019375
QVTLKESGPVLVKPTETLTLTCTVSGFSLTRYGIHWVRQPPGKGLEWLAVIWSGVTDYNPSLKSRLTISKDNSKSQVVLTMTNMDPVDTATYYCARPYYYAMDYWGQGTLVTVSS

SEQ ID NO: 22043 - protein, 5 aa, Artificial Sequence
  Description of Artificial Sequence: Synthetic peptide
  XENP019375 vhCDR1
RYGIH

SEQ ID NO: 22044 - protein, 15 aa, Artificial Sequence
  Description of Artificial Sequence: Synthetic peptide
  XENP019375 vhCDR2
VIWSGVTDYNPSLKS

SEQ ID NO: 22045 - protein, 8 aa, Artificial Sequence
  Description of Artificial Sequence: Synthetic peptide
  XENP019375 vhCDR3
PYYYAMDY

SEQ ID NO: 22046 - protein, 214 aa, Artificial Sequence; identical to SEQ ID NO: 22026
  Description of Artificial Sequence: Synthetic polypeptide
  XENP019375 9E7_H2L1_IgG1_PVA_/S267K Light Chain

SEQ ID NO: 22047 - protein, 107 aa, Artificial Sequence; identical to SEQ ID NO: 22027
  Description of Artificial Sequence: Synthetic polypeptide
  VL of XENP019375

SEQ ID NO: 22048 - protein, 11 aa, Artificial Sequence
  Description of Artificial Sequence: Synthetic peptide
  XENP019375 vlCDR1
RASENIYSNLA

SEQ ID NO: 22049 - protein, 7 aa, Artificial Sequence
  Description of Artificial Sequence: Synthetic peptide
  XENP019375 vlCDR2
AATTLAD

SEQ ID NO: 22050 - protein, 9 aa, Artificial Sequence
  Description of Artificial Sequence: Synthetic peptide
  XENP019375 vlCDR3
QHFWGTPWT

SEQ ID NO: 22051 - protein, 444 aa, Artificial Sequence; identical to SEQ ID NO: 22041
  Description of Artificial Sequence: Synthetic polypeptide
  XENP019376 9E7_H2L2_IgG1_PVA_/S267K Heavy Chain

SEQ ID NO: 22052 - protein, 115 aa, Artificial Sequence; identical to SEQ ID NO: 22042
  Description of Artificial Sequence: Synthetic polypeptide
  VH of XENP019376

SEQ ID NO: 22053 - protein, 5 aa, Artificial Sequence
  Description of Artificial Sequence: Synthetic peptide
  XENP019376 vhCDR1
RYGIH

SEQ ID NO: 22054 - protein, 15 aa, Artificial Sequence
  Description of Artificial Sequence: Synthetic peptide
  XENP019376 vhCDR2
VIWSGVTDYNPSLKS

SEQ ID NO: 22055 - protein, 8 aa, Artificial Sequence
  Description of Artificial Sequence: Synthetic peptide
  XENP019376 vhCDR3
PYYYAMDY

SEQ ID NO: 22056 - protein, 214 aa, Artificial Sequence; identical to SEQ ID NO: 22036
  Description of Artificial Sequence: Synthetic polypeptide
  XENP019376 9E7_H2L2_IgG1_PVA_/S267K Light Chain

SEQ ID NO: 22057 - protein, 107 aa, Artificial Sequence; identical to SEQ ID NO: 22037
  Description of Artificial Sequence: Synthetic polypeptide
  VL of XENP019376

SEQ ID NO: 22058 - protein, 11 aa, Artificial Sequence
  Description of Artificial Sequence: Synthetic peptide
  XENP019376 vlCDR1
RASENIYSNLA

SEQ ID NO: 22059 - protein, 7 aa, Artificial Sequence
  Description of Artificial Sequence: Synthetic peptide
  XENP019376 vlCDR2
AATTLAD

SEQ ID NO: 22060 - protein, 9 aa, Artificial Sequence
  Description of Artificial Sequence: Synthetic peptide
  XENP019376 vlCDR3
QHFWGTPWT

SEQ ID NO: 22061 - protein, 444 aa, Artificial Sequence
  Description of Artificial Sequence: Synthetic polypeptide
  XENP019377 9E7_H3L1_IgG1_PVA_/S267K Heavy Chain
EVQLVESGGGLVQPGGSLRLSCAVSGFSLTRYGIHWVRQAPGKGLEWVSVIWSGVTDYNPSVKGRFTISKDNSKSTVYLQMNSLRAEDTAVYYCARPYYYAMDYWGQGTLVTVSSASTKGPSVFPLAPSSKSTSGGTAALGCLVKDYFPEPVTVSWNSGALTSGVHTFPAVLQSSGLYSLSSVVTVPSSSLGTQTYICNVNHKPSDTKVDKKVEPKSCDKTHTCPPCPAPPVAGPSVFLFPPKPKDTLMISRTPEVTCVVVDVKHEDPEVKFNWYVDGVEVHNAKTKPREEEYNSTYRVVSVLTVLHQDWLNGKEYKCKVSNKALPAPIEKTISKAKGQPREPQVYTLPPSREEMTKNQVSLTCDVSGFYPSDIAVEWESDGQPENNYKTTPPVLDSDGSFFLYSKLTVDKSRWEQGDVFSCSVMHEALHNHYTQKSLSLSPGK

SEQ ID NO: 22062 - protein, 115 aa, Artificial Sequence
  Description of Artificial Sequence: Synthetic polypeptide
  VH of XENP019377
EVQLVESGGGLVQPGGSLRLSCAVSGFSLTRYGIHWVRQAPGKGLEWVSVIWSGVTDYNPSVKGRFTISKDNSKSTVYLQMNSLRAEDTAVYYCARPYYYAMDYWGQGTLVTVSS

SEQ ID NO: 22063 - protein, 5 aa, Artificial Sequence
  Description of Artificial Sequence: Synthetic peptide
  XENP019377 vhCDR1
RYGIH

SEQ ID NO: 22064 - protein, 15 aa, Artificial Sequence
  Description of Artificial Sequence: Synthetic peptide
  XENP019377 vhCDR2
VIWSGVTDYNPSVKG

SEQ ID NO: 22065 - protein, 8 aa, Artificial Sequence
  Description of Artificial Sequence: Synthetic peptide
  XENP019377 vhCDR3
PYYYAMDY

SEQ ID NO: 22066 - protein, 214 aa, Artificial Sequence; identical to SEQ ID NO: 22026
  Description of Artificial Sequence: Synthetic polypeptide
  XENP019377 9E7_H3L1_IgG1_PVA_/S267K Light Chain

SEQ ID NO: 22067 - protein, 107 aa, Artificial Sequence; identical to SEQ ID NO: 22027
  Description of Artificial Sequence: Synthetic polypeptide
  VL of XENP019377

SEQ ID NO: 22068 - protein, 11 aa, Artificial Sequence
  Description of Artificial Sequence: Synthetic peptide
  XENP019377 vlCDR1
RASENIYSNLA

SEQ ID NO: 22069 - protein, 7 aa, Artificial Sequence
  Description of Artificial Sequence: Synthetic peptide
  XENP019377 vlCDR2
AATTLAD

SEQ ID NO: 22070 - protein, 9 aa, Artificial Sequence
  Description of Artificial Sequence: Synthetic peptide
  XENP019377 vlCDR3
QHFWGTPWT

SEQ ID NO: 22071 - protein, 444 aa, Artificial Sequence; identical to SEQ ID NO: 22061
  Description of Artificial Sequence: Synthetic polypeptide
  XENP019378 9E7_H3L2_IgG1_PVA_/S267K Heavy Chain

SEQ ID NO: 22072 - protein, 115 aa, Artificial Sequence; identical to SEQ ID NO: 22062
  Description of Artificial Sequence: Synthetic polypeptide
  VH of XENP019378

SEQ ID NO: 22073 - protein, 5 aa, Artificial Sequence
  Description of Artificial Sequence: Synthetic peptide
  XENP019378 vhCDR1
RYGIH

SEQ ID NO: 22074 - protein, 15 aa, Artificial Sequence
  Description of Artificial Sequence: Synthetic peptide
  XENP019378 vhCDR2
VIWSGVTDYNPSVKG

SEQ ID NO: 22075 - protein, 8 aa, Artificial Sequence
  Description of Artificial Sequence: Synthetic peptide
  XENP019378 vhCDR3
PYYYAMDY

SEQ ID NO: 22076 - protein, 214 aa, Artificial Sequence; identical to SEQ ID NO: 22036
  Description of Artificial Sequence: Synthetic polypeptide
  XENP019378 9E7_H3L2_IgG1_PVA_/S267K Light Chain

SEQ ID NO: 22077 - protein, 107 aa, Artificial Sequence; identical to SEQ ID NO: 22037
  Description of Artificial Sequence: Synthetic polypeptide
  VL of XENP019378

SEQ ID NO: 22078 - protein, 11 aa, Artificial Sequence
  Description of Artificial Sequence: Synthetic peptide
  XENP019378 vlCDR1
RASENIYSNLA

SEQ ID NO: 22079 - protein, 7 aa, Artificial Sequence
  Description of Artificial Sequence: Synthetic peptide
  XENP019378 vlCDR2
AATTLAD

SEQ ID NO: 22080 - protein, 9 aa, Artificial Sequence
  Description of Artificial Sequence: Synthetic peptide
  XENP019378 vlCDR3
QHFWGTPWT

SEQ ID NO: 22081 - protein, 444 aa, Artificial Sequence
  Description of Artificial Sequence: Synthetic polypeptide
  XENP019379 9E7_H4L1_IgG1_PVA_/S267K Heavy Chain
EVQLVQSGAEVKKPGESLKISCKVSGFSLTRYGIHWVRQMPGKGLEWMGVIWSGVTDYNPSFQGQVTISKDNSISTVYLQWSSLKASDTAMYYCARPYYYAMDYWGQGTLVTVSSASTKGPSVFPLAPSSKSTSGGTAALGCLVKDYFPEPVTVSWNSGALTSGVHTFPAVLQSSGLYSLSSVVTVPSSSLGTQTYICNVNHKPSDTKVDKKVEPKSCDKTHTCPPCPAPPVAGPSVFLFPPKPKDTLMISRTPEVTCVVVDVKHEDPEVKFNWYVDGVEVHNAKTKPREEEYNSTYRVVSVLTVLHQDWLNGKEYKCKVSNKALPAPIEKTISKAKGQPREPQVYTLPPSREEMTKNQVSLTCDVSGFYPSDIAVEWESDGQPENNYKTTPPVLDSDGSFFLYSKLTVDKSRWEQGDVFSCSVMHEALHNHYTQKSLSLSPGK

SEQ ID NO: 22082 - protein, 115 aa, Artificial Sequence
  Description of Artificial Sequence: Synthetic polypeptide
  VH of XENP019379
EVQLVQSGAEVKKPGESLKISCKVSGFSLTRYGIHWVRQMPGKGLEWMGVIWSGVTDYNPSFQGQVTISKDNSISTVYLQWSSLKASDTAMYYCARPYYYAMDYWGQGTLVTVSS

SEQ ID NO: 22083 - protein, 5 aa, Artificial Sequence
  Description of Artificial Sequence: Synthetic peptide
  XENP019379 vhCDR1
RYGIH

SEQ ID NO: 22084 - protein, 15 aa, Artificial Sequence
  Description of Artificial Sequence: Synthetic peptide
  XENP019379 vhCDR2
VIWSGVTDYNPSFQG

SEQ ID NO: 22085 - protein, 8 aa, Artificial Sequence
  Description of Artificial Sequence: Synthetic peptide
  XENP019379 vhCDR3
PYYYAMDY

SEQ ID NO: 22086 - protein, 214 aa, Artificial Sequence; identical to SEQ ID NO: 22026
  Description of Artificial Sequence: Synthetic polypeptide
  XENP019379 9E7_H4L1_IgG1_PVA_/S267K Light Chain

SEQ ID NO: 22087 - protein, 107 aa, Artificial Sequence; identical to SEQ ID NO: 22027
  Description of Artificial Sequence: Synthetic polypeptide
  VL of XENP019379

SEQ ID NO: 22088 - protein, 11 aa, Artificial Sequence
  Description of Artificial Sequence: Synthetic peptide
  XENP019379 vlCDR1
RASENIYSNLA

SEQ ID NO: 22089 - protein, 7 aa, Artificial Sequence
  Description of Artificial Sequence: Synthetic peptide
  XENP019379 vlCDR2
AATTLAD

SEQ ID NO: 22090 - protein, 9 aa, Artificial Sequence
  Description of Artificial Sequence: Synthetic peptide
  XENP019379 vlCDR3
QHFWGTPWT

SEQ ID NO: 22091 - protein, 444 aa, Artificial Sequence; identical to SEQ ID NO: 22081
  Description of Artificial Sequence: Synthetic polypeptide
  XENP019380 9E7_H4L2_IgG1_PVA_/S267K Heavy Chain

SEQ ID NO: 22092 - protein, 115 aa, Artificial Sequence; identical to SEQ ID NO: 22082
  Description of Artificial Sequence: Synthetic polypeptide
  VH of XENP019380

SEQ ID NO: 22093 - protein, 5 aa, Artificial Sequence
  Description of Artificial Sequence: Synthetic peptide
  XENP019380 vhCDR1
RYGIH

SEQ ID NO: 22094 - protein, 15 aa, Artificial Sequence
  Description of Artificial Sequence: Synthetic peptide
  XENP019380 vhCDR2
VIWSGVTDYNPSFQG

SEQ ID NO: 22095 - protein, 8 aa, Artificial Sequence
  Description of Artificial Sequence: Synthetic peptide
  XENP019380 vhCDR3
PYYYAMDY

SEQ ID NO: 22096 - protein, 214 aa, Artificial Sequence; identical to SEQ ID NO: 22036
  Description of Artificial Sequence: Synthetic polypeptide
  XENP019380 9E7_H4L2_IgG1_PVA_/S267K Light Chain

SEQ ID NO: 22097 - protein, 107 aa, Artificial Sequence; identical to SEQ ID NO: 22037
  Description of Artificial Sequence: Synthetic polypeptide
  VL of XENP019380

SEQ ID NO: 22098 - protein, 11 aa, Artificial Sequence
  Description of Artificial Sequence: Synthetic peptide
  XENP019380 vlCDR1
RASENIYSNLA

SEQ ID NO: 22099 - protein, 7 aa, Artificial Sequence
  Description of Artificial Sequence: Synthetic peptide
  XENP019380 vlCDR2
AATTLAD

SEQ ID NO: 22100 - protein, 9 aa, Artificial Sequence
  Description of Artificial Sequence: Synthetic peptide
  XENP019380 vlCDR3
QHFWGTPWT

SEQ ID NO: 22101 - protein, 447 aa, Artificial Sequence
  Description of Artificial Sequence: Synthetic polypeptide
  XENP019381 2A12_H1L1_IgG1_PVA_/S267K Heavy Chain
QIQLVQSGSELKKPGASVKVSCKASGYTFTNYGMNWVRQAPGQGLEWMGWINTYTGEPTYADGFTGRFVFSLDTSVSTAYLQISSLKAEDTAVYFCARLEAIYGSDYWGQGTLVTVSSASTKGPSVFPLAPSSKSTSGGTAALGCLVKDYFPEPVTVSWNSGALTSGVHTFPAVLQSSGLYSLSSVVTVPSSSLGTQTYICNVNHKPSDTKVDKKVEPKSCDKTHTCPPCPAPPVAGPSVFLFPPKPKDTLMISRTPEVTCVVVDVKHEDPEVKFNWYVDGVEVHNAKTKPREEEYNSTYRVVSVLTVLHQDWLNGKEYKCKVSNKALPAPIEKTISKAKGQPREPQVYTLPPSREEMTKNQVSLTCDVSGFYPSDIAVEWESDGQPENNYKTTPPVLDSDGSFFLYSKLTVDKSRWEQGDVFSCSVMHEALHNHYTQKSLSLSPGK

SEQ ID NO: 22102 - protein, 118 aa, Artificial Sequence
  Description of Artificial Sequence: Synthetic polypeptide
  VH of XENP019381
QIQLVQSGSELKKPGASVKVSCKASGYTFTNYGMNWVRQAPGQGLEWMGWINTYTGEPTYADGFTGRFVFSLDTSVSTAYLQISSLKAEDTAVYFCARLEAIYGSDYWGQGTLVTVSS

SEQ ID NO: 22103 - protein, 5 aa, Artificial Sequence
  Description of Artificial Sequence: Synthetic peptide
  XENP019381 vhCDR1
NYGMN

SEQ ID NO: 22104 - protein, 17 aa, Artificial Sequence
  Description of Artificial Sequence: Synthetic peptide
  XENP019381 vhCDR2
WINTYTGEPTYADGFTG

SEQ ID NO: 22105 - protein, 9 aa, Artificial Sequence
  Description of Artificial Sequence: Synthetic peptide
  XENP019381 vhCDR3
LEAIYGSDY

SEQ ID NO: 22106 - protein, 214 aa, Artificial Sequence
  Description of Artificial Sequence: Synthetic polypeptide
  XENP019381 2A12_H1L1_IgG1_PVA_/S267K Light Chain
DIQMTQSPSSLSASVGDRVTITCRASQEISGYLSWLQQKPGKTIKRLIYAASTLDSGVPKRFSDSRSGSDYTLTISSLQPEDFATYYCLQYTSYPFTFGSGTKLEIKRTVAAPSVFIFPPSDEQLKSGTASVVCLLNNFYPREAKVQWKVDNALQSGNSQESVTEQDSKDSTYSLSSTLTLSKADYEKHKVYACEVTHQGLSSPVTKSFNRGEC

SEQ ID NO: 22107 - protein, 107 aa, Artificial Sequence
  Description of Artificial Sequence: Synthetic polypeptide
  VL of XENP019381
DIQMTQSPSSLSASVGDRVTITCRASQEISGYLSWLQQKPGKTIKRLIYAASTLDSGVPKRFSDSRSGSDYTLTISSLQPEDFATYYCLQYTSYPFTFGSGTKLEIK

SEQ ID NO: 22108 - protein, 11 aa, Artificial Sequence
  Description of Artificial Sequence: Synthetic peptide
  XENP019381 vlCDR1
RASQEISGYLS

SEQ ID NO: 22109 - protein, 7 aa, Artificial Sequence
  Description of Artificial Sequence: Synthetic peptide
  XENP019381 vlCDR2
AASTLDS

SEQ ID NO: 22110 - protein, 9 aa, Artificial Sequence
  Description of Artificial Sequence: Synthetic peptide
  XENP019381 vlCDR3
LQYTSYPFT

SEQ ID NO: 22111 - protein, 449 aa, Artificial Sequence
  Description of Artificial Sequence: Synthetic polypeptide
  XENP019382 4C8_H1L1_IgG1_PVA_/S267K Heavy Chain
QVQLVQSGAEVKKPGASVKVSCKASGYTFTDYNMHWVRQAPGQSLEWMGYIYPYTGGTGYNQKFQGRVTMTVDNSISTAYMELSRLRSDDTAVYYCARSDDGYSYAMDYWGQGTLVTVSSASTKGPSVFPLAPSSKSTSGGTAALGCLVKDYFPEPVTVSWNSGALTSGVHTFPAVLQSSGLYSLSSVVTVPSSSLGTQTYICNVNHKPSDTKVDKKVEPKSCDKTHTCPPCPAPPVAGPSVFLFPPKPKDTLMISRTPEVTCVVVDVKHEDPEVKFNWYVDGVEVHNAKTKPREEEYNSTYRVVSVLTVLHQDWLNGKEYKCKVSNKALPAPIEKTISKAKGQPREPQVYTLPPSREEMTKNQVSLTCDVSGFYPSDIAVEWESDGQPENNYKTTPPVLDSDGSFFLYSKLTVDKSRWEQGDVFSCSVMHEALHNHYTQKSLSLSPGK

SEQ ID NO: 22112 - protein, 120 aa, Artificial Sequence
  Description of Artificial Sequence: Synthetic polypeptide
  VH of XENP019382
QVQLVQSGAEVKKPGASVKVSCKASGYTFTDYNMHWVRQAPGQSLEWMGYIYPYTGGTGYNQKFQGRVTMTVDNSISTAYMELSRLRSDDTAVYYCARSDDGYSYAMDYWGQGTLVTVSS

SEQ ID NO: 22113 - protein, 5 aa, Artificial Sequence
  Description of Artificial Sequence: Synthetic peptide
  XENP019382 vhCDR1
DYNMH

SEQ ID NO: 22114 - protein, 17 aa, Artificial Sequence
  Description of Artificial Sequence: Synthetic peptide
  XENP019382 vhCDR2
YIYPYTGGTGYNQKFQG

SEQ ID NO: 22115 - protein, 11 aa, Artificial Sequence
  Description of Artificial Sequence: Synthetic peptide
  XENP019382 vhCDR3
SDDGYSYAMDY

SEQ ID NO: 22116 - protein, 213 aa, Artificial Sequence
  Description of Artificial Sequence: Synthetic polypeptide
  XENP019382 4C8_H1L1_IgG1_PVA_/S267K Light Chain
DIQMTQSPSSLSASVGDRVTITCQASQDISNYLNWYQQKPGKTVKLLIYYTSRLHSGVPSRFSGSGSGTDYTFTISSLQPEDIATYFCQQGNTLWTFGGGTKVEIKRTVAAPSVFIFPPSDEQLKSGTASVVCLLNNFYPREAKVQWKVDNALQSGNSQESVTEQDSKDSTYSLSSTLTLSKADYEKHKVYACEVTHQGLSSPVTKSFNRGEC

SEQ ID NO: 22117 - protein, 106 aa, Artificial Sequence
  Description of Artificial Sequence: Synthetic polypeptide
  VL of XENP019382
DIQMTQSPSSLSASVGDRVTITCQASQDISNYLNWYQQKPGKTVKLLIYYTSRLHSGVPSRFSGSGSGTDYTFTISSLQPEDIATYFCQQGNTLWTFGGGTKVEIK

SEQ ID NO: 22118 - protein, 11 aa, Artificial Sequence
  Description of Artificial Sequence: Synthetic peptide
  XENP019382 vlCDR1
QASQDISNYLN

SEQ ID NO: 22119 - protein, 7 aa, Artificial Sequence
  Description of Artificial Sequence: Synthetic peptide
  XENP019382 vlCDR2
YTSRLHS

SEQ ID NO: 22120 - protein, 8 aa, Artificial Sequence
  Description of Artificial Sequence: Synthetic peptide
  XENP019382 vlCDR3
QQGNTLWT

SEQ ID NO: 22121 - protein, 445 aa, Artificial Sequence
  Description of Artificial Sequence: Synthetic polypeptide
  XENP019383 7A6_H0L0_IgG1_PVA_/S267K Heavy Chain
DVQLQESGPGLVKPSQSLSLTCSVTGYSITSGYFWNWIRQFPGNKLEWMGYISYDSNYYNPSLKNRISITRDTSKNQFFLKLNSVTTEDTATYYCARGGITTFDYWGQGTTLTVSSASTKGPSVFPLAPSSKSTSGGTAALGCLVKDYFPEPVTVSWNSGALTSGVHTFPAVLQSSGLYSLSSVVTVPSSSLGTQTYICNVNHKPSDTKVDKKVEPKSCDKTHTCPPCPAPPVAGPSVFLFPPKPKDTLMISRTPEVTCVVVDVKHEDPEVKFNWYVDGVEVHNAKTKPREEEYNSTYRVVSVLTVLHQDWLNGKEYKCKVSNKALPAPIEKTISKAKGQPREPQVYTLPPSREEMTKNQVSLTCDVSGFYPSDIAVEWESDGQPENNYKTTPPVLDSDGSFFLYSKLTVDKSRWEQGDVFSCSVMHEALHNHYTQKSLSLSPGK

SEQ ID NO: 22122 - protein, 116 aa, Artificial Sequence
  Description of Artificial Sequence: Synthetic polypeptide
  VH of XENP019383
DVQLQESGPGLVKPSQSLSLTCSVTGYSITSGYFWNWIRQFPGNKLEWMGYISYDSNYYNPSLKNRISITRDTSKNQFFLKLNSVTTEDTATYYCARGGITTFDYWGQGTTLTVSS

SEQ ID NO: 22123 - protein, 6 aa, Artificial Sequence
  Description of Artificial Sequence: Synthetic peptide
  XENP019383 vhCDR1
SGYFWN

SEQ ID NO: 22124 - protein, 15 aa, Artificial Sequence
  Description of Artificial Sequence: Synthetic peptide
  XENP019383 vhCDR2
YISYDSNYYNPSLKN

SEQ ID NO: 22125 - protein, 8 aa, Artificial Sequence
  Description of Artificial Sequence: Synthetic peptide
  XENP019383 vhCDR3
GGITTFDY

SEQ ID NO: 22126 - protein, 218 aa, Artificial Sequence
  Description of Artificial Sequence: Synthetic polypeptide
  XENP019383 7A6_H0L0_IgG1_PVA_/S267K Light Chain
DIVLTQSPASLAVSLGQRATISCKASQSVDYDGDSYMNWYQQKPGQPPKLLIYAASNLESGIPARFSGSGSGTDFTLNIHPVEEEDAATYYCQQSNEDPRTFGGGTKLEIKRTVAAPSVFIFPPSDEQLKSGTASVVCLLNNFYPREAKVQWKVDNALQSGNSQESVTEQDSKDSTYSLSSTLTLSKADYEKHKVYACEVTHQGLSSPVTKSFNRGEC

SEQ ID NO: 22127 - protein, 111 aa, Artificial Sequence
  Description of Artificial Sequence: Synthetic polypeptide
  VL of XENP019383
DIVLTQSPASLAVSLGQRATISCKASQSVDYDGDSYMNWYQQKPGQPPKLLIYAASNLESGIPARFSGSGSGTDFTLNIHPVEEEDAATYYCQQSNEDPRTFGGGTKLEIK

SEQ ID NO: 22128 - protein, 15 aa, Artificial Sequence
  Description of Artificial Sequence: Synthetic peptide
  XENP019383 vlCDR1
KASQSVDYDGDSYMN

SEQ ID NO: 22129 - protein, 7 aa, Artificial Sequence
  Description of Artificial Sequence: Synthetic peptide
  XENP019383 vlCDR2
AASNLES

SEQ ID NO: 22130 - protein, 9 aa, Artificial Sequence
  Description of Artificial Sequence: Synthetic peptide
  XENP019383 vlCDR3
QQSNEDPRT

SEQ ID NO: 22131 - protein, 445 aa, Artificial Sequence
  Description of Artificial Sequence: Synthetic polypeptide
  XENP019384 7A6_H1L1_IgG1_PVA_/S267K Heavy Chain
QVQLVESGGGVVQPGRSLRLSCAVSGYSITSGYFWNWIRQAPGKKLEWVAYISYDSNYYNPSVKGRFTISRDTSKNTFYLQMNSLRAEDTAVYYCARGGITTFDYWGQGTLVTVSSASTKGPSVFPLAPSSKSTSGGTAALGCLVKDYFPEPVTVSWNSGALTSGVHTFPAVLQSSGLYSLSSVVTVPSSSLGTQTYICNVNHKPSDTKVDKKVEPKSCDKTHTCPPCPAPPVAGPSVFLFPPKPKDTLMISRTPEVTCVVVDVKHEDPEVKFNWYVDGVEVHNAKTKPREEEYNSTYRVVSVLTVLHQDWLNGKEYKCKVSNKALPAPIEKTISKAKGQPREPQVYTLPPSREEMTKNQVSLTCDVSGFYPSDIAVEWESDGQPENNYKTTPPVLDSDGSFFLYSKLTVDKSRWEQGDVFSCSVMHEALHNHYTQKSLSLSPGK

SEQ ID NO: 22132 - protein, 116 aa, Artificial Sequence
  Description of Artificial Sequence: Synthetic polypeptide
  VH of XENP019384
QVQLVESGGGVVQPGRSLRLSCAVSGYSITSGYFWNWIRQAPGKKLEWVAYISYDSNYYNPSVKGRFTISRDTSKNTFYLQMNSLRAEDTAVYYCARGGITTFDYWGQGTLVTVSS

SEQ ID NO: 22133 - protein, 6 aa, Artificial Sequence
  Description of Artificial Sequence: Synthetic peptide
  XENP019384 vhCDR1
SGYFWN

SEQ ID NO: 22134 - protein, 15 aa, Artificial Sequence
  Description of Artificial Sequence: Synthetic peptide
  XENP019384 vhCDR2
YISYDSNYYNPSVKG

SEQ ID NO: 22135 - protein, 8 aa, Artificial Sequence
  Description of Artificial Sequence: Synthetic peptide
  XENP019384 vhCDR3
GGITTFDY

SEQ ID NO: 22136 - protein, 218 aa, Artificial Sequence
  Description of Artificial Sequence: Synthetic polypeptide
  XENP019384 7A6_H1L1_IgG1_PVA_/S267K Light Chain
DIVLTQSPSSLSASVGDRVTITCRASQSVDYDGDSYMNWYQQKPGKPPKLLIYAASNLESGIPARFSGSGSGTDFTLTISSLQPEDFATYYCQQSNEDPRTFGGGTKVEIKRTVAAPSVFIFPPSDEQLKSGTASVVCLLNNFYPREAKVQWKVDNALQSGNSQESVTEQDSKDSTYSLSSTLTLSKADYEKHKVYACEVTHQGLSSPVTKSFNRGEC

SEQ ID NO: 22137 - protein, 111 aa, Artificial Sequence
  Description of Artificial Sequence: Synthetic polypeptide
  VL of XENP019384
DIVLTQSPSSLSASVGDRVTITCRASQSVDYDGDSYMNWYQQKPGKPPKLLIYAASNLESGIPARFSGSGSGTDFTLTISSLQPEDFATYYCQQSNEDPRTFGGGTKVEIK

SEQ ID NO: 22138 - protein, 15 aa, Artificial Sequence
  Description of Artificial Sequence: Synthetic peptide
  XENP019384 vlCDR1
RASQSVDYDGDSYMN

SEQ ID NO: 22139 - protein, 7 aa, Artificial Sequence
  Description of Artificial Sequence: Synthetic peptide
  XENP019384 vlCDR2
AASNLES

SEQ ID NO: 22140 - protein, 9 aa, Artificial Sequence
  Description of Artificial Sequence: Synthetic peptide
  XENP019384 vlCDR3
QQSNEDPRT

SEQ ID NO: 22141 - protein, 445 aa, Artificial Sequence; identical to SEQ ID NO: 22131
  Description of Artificial Sequence: Synthetic polypeptide
  XENP019385 7A6_H1L2_IgG1_PVA_/S267K Heavy Chain

SEQ ID NO: 22142 - protein, 116 aa, Artificial Sequence; identical to SEQ ID NO: 22132
  Description of Artificial Sequence: Synthetic polypeptide
  VH of XENP019385

SEQ ID NO: 22143 - protein, 6 aa, Artificial Sequence
  Description of Artificial Sequence: Synthetic peptide
  XENP019385 vhCDR1
SGYFWN

SEQ ID NO: 22144 - protein, 15 aa, Artificial Sequence
  Description of Artificial Sequence: Synthetic peptide
  XENP019385 vhCDR2
YISYDSNYYNPSVKG

SEQ ID NO: 22145 - protein, 8 aa, Artificial Sequence
  Description of Artificial Sequence: Synthetic peptide
  XENP019385 vhCDR3
GGITTFDY

SEQ ID NO: 22146 - protein, 218 aa, Artificial Sequence; identical to SEQ ID NO: 21996
  Description of Artificial Sequence: Synthetic polypeptide
  XENP019385 7A6_H1L2_IgG1_PVA_/S267K Light Chain

SEQ ID NO: 22147 - protein, 111 aa, Artificial Sequence; identical to SEQ ID NO: 21997
  Description of Artificial Sequence: Synthetic polypeptide
  VL of XENP019385

SEQ ID NO: 22148 - protein, 15 aa, Artificial Sequence
  Description of Artificial Sequence: Synthetic peptide
  XENP019385 vlCDR1
RASQSVDYDGDSYMN

SEQ ID NO: 22149 - protein, 7 aa, Artificial Sequence
  Description of Artificial Sequence: Synthetic peptide
  XENP019385 vlCDR2
AASNLES

SEQ ID NO: 22150 - protein, 9 aa, Artificial Sequence
  Description of Artificial Sequence: Synthetic peptide
  XENP019385 vlCDR3
QQSNEDPRT

SEQ ID NO: 22151 - protein, 445 aa, Artificial Sequence; identical to SEQ ID NO: 22131
  Description of Artificial Sequence: Synthetic polypeptide
  XENP019386 7A6_H1L3_IgG1_PVA_/S267K Heavy Chain

SEQ ID NO: 22152 - protein, 116 aa, Artificial Sequence; identical to SEQ ID NO: 22132
  Description of Artificial Sequence: Synthetic polypeptide
  VH of XENP019386

SEQ ID NO: 22153 - protein, 6 aa, Artificial Sequence
  Description of Artificial Sequence: Synthetic peptide
  XENP019386 vhCDR1
SGYFWN

SEQ ID NO: 22154 - protein, 15 aa, Artificial Sequence
  Description of Artificial Sequence: Synthetic peptide
  XENP019386 vhCDR2
YISYDSNYYNPSVKG

SEQ ID NO: 22155 - protein, 8 aa, Artificial Sequence
  Description of Artificial Sequence: Synthetic peptide
  XENP019386 vhCDR3
GGITTFDY

SEQ ID NO: 22156 - protein, 218 aa, Artificial Sequence
  Description of Artificial Sequence: Synthetic polypeptide
  XENP019386 7A6_H1L3_IgG1_PVA_/S267K Light Chain
DIVLTQSPDSLAVSLGERATINCKASQSVDYDGDSYMNWYQQKPGQPPKLLIYAASNLESGIPARFSGSGSGTDFTLTISSLQAEDVAVYYCQQSNEDPRTFGGGTKVEIKRTVAAPSVFIFPPSDEQLKSGTASVVCLLNNFYPREAKVQWKVDNALQSGNSQESVTEQDSKDSTYSLSSTLTLSKADYEKHKVYACEVTHQGLSSPVTKSFNRGEC

SEQ ID NO: 22157 - protein, 111 aa, Artificial Sequence
  Description of Artificial Sequence: Synthetic polypeptide
  VL of XENP019386
DIVLTQSPDSLAVSLGERATINCKASQSVDYDGDSYMNWYQQKPGQPPKLLIYAASNLESGIPARFSGSGSGTDFTLTISSLQAEDVAVYYCQQSNEDPRTFGGGTKVEIK

SEQ ID NO: 22158 - protein, 15 aa, Artificial Sequence
  Description of Artificial Sequence: Synthetic peptide
  XENP019386 vlCDR1
KASQSVDYDGDSYMN

SEQ ID NO: 22159 - protein, 7 aa, Artificial Sequence
  Description of Artificial Sequence: Synthetic peptide
  XENP019386 vlCDR2
AASNLES

SEQ ID NO: 22160 - protein, 9 aa, Artificial Sequence
  Description of Artificial Sequence: Synthetic peptide
  XENP019386 vlCDR3
QQSNEDPRT

SEQ ID NO: 22161 - protein, 445 aa, Artificial Sequence
  Description of Artificial Sequence: Synthetic polypeptide
  XENP019387 7A6_H2L1_IgG1_PVA_/S267K Heavy Chain
QVQLQESGPGLVKPSQTLSLTCTVSGYSITSGYFWNWIRQHPGKKLEWIGYISYDSNYYNPSLKSLVTISRDTSKNQFSLKLSSVTAADTAVYYCARGGITTFDYWGQGTLVTVSSASTKGPSVFPLAPSSKSTSGGTAALGCLVKDYFPEPVTVSWNSGALTSGVHTFPAVLQSSGLYSLSSVVTVPSSSLGTQTYICNVNHKPSDTKVDKKVEPKSCDKTHTCPPCPAPPVAGPSVFLFPPKPKDTLMISRTPEVTCVVVDVKHEDPEVKFNWYVDGVEVHNAKTKPREEEYNSTYRVVSVLTVLHQDWLNGKEYKCKVSNKALPAPIEKTISKAKGQPREPQVYTLPPSREEMTKNQVSLTCDVSGFYPSDIAVEWESDGQPENNYKTTPPVLDSDGSFFLYSKLTVDKSRWEQGDVFSCSVMHEALHNHYTQKSLSLSPGK

SEQ ID NO: 22162 - protein, 116 aa, Artificial Sequence
  Description of Artificial Sequence: Synthetic polypeptide
  VH of XENP019387
QVQLQESGPGLVKPSQTLSLTCTVSGYSITSGYFWNWIRQHPGKKLEWIGYISYDSNYYNPSLKSLVTISRDTSKNQFSLKLSSVTAADTAVYYCARGGITTFDYWGQGTLVTVSS

SEQ ID NO: 22163 - protein, 6 aa, Artificial Sequence
  Description of Artificial Sequence: Synthetic peptide
  XENP019387 vhCDR1
SGYFWN

SEQ ID NO: 22164 - protein, 15 aa, Artificial Sequence
  Description of Artificial Sequence: Synthetic peptide
  XENP019387 vhCDR2
YISYDSNYYNPSLKS

SEQ ID NO: 22165 - protein, 8 aa, Artificial Sequence
  Description of Artificial Sequence: Synthetic peptide
  XENP019387 vhCDR3
GGITTFDY

SEQ ID NO: 22166 - protein, 218 aa, Artificial Sequence; identical to SEQ ID NO: 22136
  Description of Artificial Sequence: Synthetic polypeptide
  XENP019387 7A6_H2L1_IgG1_PVA_/S267K Light Chain

SEQ ID NO: 22167 - protein, 111 aa, Artificial Sequence; identical to SEQ ID NO: 22137
  Description of Artificial Sequence: Synthetic polypeptide
  VL of XENP019387

SEQ ID NO: 22168 - protein, 15 aa, Artificial Sequence
  Description of Artificial Sequence: Synthetic peptide
  XENP019387 vlCDR1
RASQSVDYDGDSYMN

SEQ ID NO: 22169 - protein, 7 aa, Artificial Sequence
  Description of Artificial Sequence: Synthetic peptide
  XENP019387 vlCDR2
AASNLES

SEQ ID NO: 22170 - protein, 9 aa, Artificial Sequence
  Description of Artificial Sequence: Synthetic peptide
  XENP019387 vlCDR3
QQSNEDPRT

SEQ ID NO: 22171 - protein, 445 aa, Artificial Sequence; identical to SEQ ID NO: 22161
  Description of Artificial Sequence: Synthetic polypeptide
  XENP019388 7A6_H2L2_IgG1_PVA_/S267K Heavy Chain

SEQ ID NO: 22172 - protein, 116 aa, Artificial Sequence; identical to SEQ ID NO: 22162
  Description of Artificial Sequence: Synthetic polypeptide
  VH of XENP019388

SEQ ID NO: 22173 - protein, 6 aa, Artificial Sequence
  Description of Artificial Sequence: Synthetic peptide
  XENP019388 vhCDR1
SGYFWN

SEQ ID NO: 22174 - protein, 15 aa, Artificial Sequence
  Description of Artificial Sequence: Synthetic peptide
  XENP019388 vhCDR2
YISYDSNYYNPSLKS

SEQ ID NO: 22175 - protein, 8 aa, Artificial Sequence
  Description of Artificial Sequence: Synthetic peptide
  XENP019388 vhCDR3
GGITTFDY

SEQ ID NO: 22176 - protein, 218 aa, Artificial Sequence; identical to SEQ ID NO: 21996
  Description of Artificial Sequence: Synthetic polypeptide
  XENP019388 7A6_H2L2_IgG1_PVA_/S267K Light Chain

SEQ ID NO: 22177 - protein, 111 aa, Artificial Sequence; identical to SEQ ID NO: 21997
  Description of Artificial Sequence: Synthetic polypeptide
  VL of XENP019388

SEQ ID NO: 22178 - protein, 15 aa, Artificial Sequence
  Description of Artificial Sequence: Synthetic peptide
  XENP019388 vlCDR1
RASQSVDYDGDSYMN

SEQ ID NO: 22179 - protein, 7 aa, Artificial Sequence
  Description of Artificial Sequence: Synthetic peptide
  XENP019388 vlCDR2
AASNLES

SEQ ID NO: 22180 - protein, 9 aa, Artificial Sequence
  Description of Artificial Sequence: Synthetic peptide
  XENP019388 vlCDR3
QQSNEDPRT

SEQ ID NO: 22181 - protein, 445 aa, Artificial Sequence; identical to SEQ ID NO: 22161
  Description of Artificial Sequence: Synthetic polypeptide
  XENP019389 7A6_H2L3_IgG1_PVA_/S267K Heavy Chain

SEQ ID NO: 22182 - protein, 116 aa, Artificial Sequence; identical to SEQ ID NO: 22162
  Description of Artificial Sequence: Synthetic polypeptide
  VH of XENP019389

SEQ ID NO: 22183 - protein, 6 aa, Artificial Sequence
  Description of Artificial Sequence: Synthetic peptide
  XENP019389 vhCDR1
SGYFWN

SEQ ID NO: 22184 - protein, 15 aa, Artificial Sequence
  Description of Artificial Sequence: Synthetic peptide
  XENP019389 vhCDR2
YISYDSNYYNPSLKS

SEQ ID NO: 22185 - protein, 8 aa, Artificial Sequence
  Description of Artificial Sequence: Synthetic peptide
  XENP019389 vhCDR3
GGITTFDY

SEQ ID NO: 22186 - protein, 218 aa, Artificial Sequence; identical to SEQ ID NO: 22156
  Description of Artificial Sequence: Synthetic polypeptide
  XENP019389 7A6_H2L3_IgG1_PVA_/S267K Light Chain

SEQ ID NO: 22187 - protein, 111 aa, Artificial Sequence; identical to SEQ ID NO: 22157
  Description of Artificial Sequence: Synthetic polypeptide
  VL of XENP019389

SEQ ID NO: 22188 - protein, 15 aa, Artificial Sequence
  Description of Artificial Sequence: Synthetic peptide
  XENP019389 vlCDR1
KASQSVDYDGDSYMN

SEQ ID NO: 22189 - protein, 7 aa, Artificial Sequence
  Description of Artificial Sequence: Synthetic peptide
  XENP019389 vlCDR2
AASNLES

SEQ ID NO: 22190 - protein, 9 aa, Artificial Sequence
  Description of Artificial Sequence: Synthetic peptide
  XENP019389 vlCDR3
QQSNEDPRT

SEQ ID NO: 22191 - protein, 445 aa, Artificial Sequence
  Description of Artificial Sequence: Synthetic polypeptide
  XENP019390 7A6_H3L1_IgG1_PVA_/S267K Heavy Chain
QVQLQQSGPGLVKPSQTLSLTCAVSGYSITSGYFWNWIRQSPSRKLEWLGYISYDSNYYNPSVKSRITINRDTSKNQFSLQLNSVTPEDTAVYYCARGGITTFDYWGQGTLVTVSSASTKGPSVFPLAPSSKSTSGGTAALGCLVKDYFPEPVTVSWNSGALTSGVHTFPAVLQSSGLYSLSSVVTVPSSSLGTQTYICNVNHKPSDTKVDKKVEPKSCDKTHTCPPCPAPPVAGPSVFLFPPKPKDTLMISRTPEVTCVVVDVKHEDPEVKFNWYVDGVEVHNAKTKPREEEYNSTYRVVSVLTVLHQDWLNGKEYKCKVSNKALPAPIEKTISKAKGQPREPQVYTLPPSREEMTKNQVSLTCDVSGFYPSDIAVEWESDGQPENNYKTTPPVLDSDGSFFLYSKLTVDKSRWEQGDVFSCSVMHEALHNHYTQKSLSLSPGK

SEQ ID NO: 22192 - protein, 116 aa, Artificial Sequence
  Description of Artificial Sequence: Synthetic polypeptide
  VH of XENP019390
QVQLQQSGPGLVKPSQTLSLTCAVSGYSITSGYFWNWIRQSPSRKLEWLGYISYDSNYYNPSVKSRITINRDTSKNQFSLQLNSVTPEDTAVYYCARGGITTFDYWGQGTLVTVSS

SEQ ID NO: 22193 - protein, 6 aa, Artificial Sequence
  Description of Artificial Sequence: Synthetic peptide
  XENP019390 vhCDR1
SGYFWN

SEQ ID NO: 22194 - protein, 15 aa, Artificial Sequence
  Description of Artificial Sequence: Synthetic peptide
  XENP019390 vhCDR2
YISYDSNYYNPSVKS

SEQ ID NO: 22195 - protein, 8 aa, Artificial Sequence
  Description of Artificial Sequence: Synthetic peptide
  XENP019390 vhCDR3
GGITTFDY

SEQ ID NO: 22196 - protein, 218 aa, Artificial Sequence; identical to SEQ ID NO: 22136
  Description of Artificial Sequence: Synthetic polypeptide
  XENP019390 7A6_H3L1_IgG1_PVA_/S267K Light Chain

SEQ ID NO: 22197 - protein, 111 aa, Artificial Sequence; identical to SEQ ID NO: 22137
  Description of Artificial Sequence: Synthetic polypeptide
  VL of XENP019390

SEQ ID NO: 22198 - protein, 15 aa, Artificial Sequence
  Description of Artificial Sequence: Synthetic peptide
  XENP019390 vlCDR1
RASQSVDYDGDSYMN

SEQ ID NO: 22199 - protein, 7 aa, Artificial Sequence
  Description of Artificial Sequence: Synthetic peptide
  XENP019390 vlCDR2
AASNLES

SEQ ID NO: 22200 - protein, 9 aa, Artificial Sequence
  Description of Artificial Sequence: Synthetic peptide
  XENP019390 vlCDR3
QQSNEDPRT

SEQ ID NO: 22201 - protein, 445 aa, Artificial Sequence; identical to SEQ ID NO: 22191
  Description of Artificial Sequence: Synthetic polypeptide
  XENP019391 7A6_H3L2_IgG1_PVA_/S267K Heavy Chain

SEQ ID NO: 22202 - protein, 116 aa, Artificial Sequence; identical to SEQ ID NO: 22192
  Description of Artificial Sequence: Synthetic polypeptide
  VH of XENP019391

SEQ ID NO: 22203 - protein, 6 aa, Artificial Sequence
  Description of Artificial Sequence: Synthetic peptide
  XENP019391 vhCDR1
SGYFWN

SEQ ID NO: 22204 - protein, 15 aa, Artificial Sequence
  Description of Artificial Sequence: Synthetic peptide
  XENP019391 vhCDR2
YISYDSNYYNPSVKS

SEQ ID NO: 22205 - protein, 8 aa, Artificial Sequence
  Description of Artificial Sequence: Synthetic peptide
  XENP019391 vhCDR3
GGITTFDY

SEQ ID NO: 22206 - protein, 218 aa, Artificial Sequence; identical to SEQ ID NO: 21996
  Description of Artificial Sequence: Synthetic polypeptide
  XENP019391 7A6_H3L2_IgG1_PVA_/S267K Light Chain

SEQ ID NO: 22207 - protein, 111 aa, Artificial Sequence; identical to SEQ ID NO: 21997
  Description of Artificial Sequence: Synthetic polypeptide
  VL of XENP019391

SEQ ID NO: 22208 - protein, 15 aa, Artificial Sequence
  Description of Artificial Sequence: Synthetic peptide
  XENP019391 vlCDR1
RASQSVDYDGDSYMN

SEQ ID NO: 22209 - protein, 7 aa, Artificial Sequence
  Description of Artificial Sequence: Synthetic peptide
  XENP019391 vlCDR2
AASNLES

SEQ ID NO: 22210 - protein, 9 aa, Artificial Sequence
  Description of Artificial Sequence: Synthetic peptide
  XENP019391 vlCDR3
QQSNEDPRT

SEQ ID NO: 22211 - protein, 445 aa, Artificial Sequence; identical to SEQ ID NO: 22191
  Description of Artificial Sequence: Synthetic polypeptide
  XENP019392 7A6_H3L3_IgG1_PVA_/S267K Heavy Chain

SEQ ID NO: 22212 - protein, 116 aa, Artificial Sequence; identical to SEQ ID NO: 22192
  Description of Artificial Sequence: Synthetic polypeptide
  VH of XENP019392

SEQ ID NO: 22213 - protein, 6 aa, Artificial Sequence
  Description of Artificial Sequence: Synthetic peptide
  XENP019392 vhCDR1
SGYFWN

SEQ ID NO: 22214 - protein, 15 aa, Artificial Sequence
  Description of Artificial Sequence: Synthetic peptide
  XENP019392 vhCDR2
YISYDSNYYNPSVKS

SEQ ID NO: 22215 - protein, 8 aa, Artificial Sequence
  Description of Artificial Sequence: Synthetic peptide
  XENP019392 vhCDR3
GGITTFDY

SEQ ID NO: 22216 - protein, 218 aa, Artificial Sequence; identical to SEQ ID NO: 22156
  Description of Artificial Sequence: Synthetic polypeptide
  XENP019392 7A6_H3L3_IgG1_PVA_/S267K Light Chain

SEQ ID NO: 22217 - protein, 111 aa, Artificial Sequence; identical to SEQ ID NO: 22157
  Description of Artificial Sequence: Synthetic polypeptide
  VL of XENP019392

SEQ ID NO: 22218 - protein, 15 aa, Artificial Sequence
  Description of Artificial Sequence: Synthetic peptide
  XENP019392 vlCDR1
KASQSVDYDGDSYMN

SEQ ID NO: 22219 - protein, 7 aa, Artificial Sequence
  Description of Artificial Sequence: Synthetic peptide
  XENP019392 vlCDR2
AASNLES

SEQ ID NO: 22220 - protein, 9 aa, Artificial Sequence
  Description of Artificial Sequence: Synthetic peptide
  XENP019392 vlCDR3
QQSNEDPRT

SEQ ID NO: 22221 - protein, 447 aa, Artificial Sequence
  Description of Artificial Sequence: Synthetic polypeptide
  XENP019393 11B2_H1_1H11_L1_IgG1_PVA_/S267K Heavy Chain
QIQLVQSGSELKKPGASVKVSCKTSGYTFTNYGMNWVRQAPGQGLEWMGWINTYTGEPTYADGFTGRFVFSLDTSVSTAYLQISSLKAEDTAVYFCARGRGMGYFDYWGQGTLVTVSSASTKGPSVFPLAPSSKSTSGGTAALGCLVKDYFPEPVTVSWNSGALTSGVHTFPAVLQSSGLYSLSSVVTVPSSSLGTQTYICNVNHKPSDTKVDKKVEPKSCDKTHTCPPCPAPPVAGPSVFLFPPKPKDTLMISRTPEVTCVVVDVKHEDPEVKFNWYVDGVEVHNAKTKPREEEYNSTYRVVSVLTVLHQDWLNGKEYKCKVSNKALPAPIEKTISKAKGQPREPQVYTLPPSREEMTKNQVSLTCDVSGFYPSDIAVEWESDGQPENNYKTTPPVLDSDGSFFLYSKLTVDKSRWEQGDVFSCSVMHEALHNHYTQKSLSLSPGK

SEQ ID NO: 22222 - protein, 118 aa, Artificial Sequence
  Description of Artificial Sequence: Synthetic polypeptide
  VH of XENP019393
QIQLVQSGSELKKPGASVKVSCKTSGYTFTNYGMNWVRQAPGQGLEWMGWINTYTGEPTYADGFTGRFVFSLDTSVSTAYLQISSLKAEDTAVYFCARGRGMGYFDYWGQGTLVTVSS

SEQ ID NO: 22223 - protein, 5 aa, Artificial Sequence
  Description of Artificial Sequence: Synthetic peptide
  XENP019393 vhCDR1
NYGMN

SEQ ID NO: 22224 - protein, 17 aa, Artificial Sequence
  Description of Artificial Sequence: Synthetic peptide
  XENP019393 vhCDR2
WINTYTGEPTYADGFTG

SEQ ID NO: 22225 - protein, 9 aa, Artificial Sequence
  Description of Artificial Sequence: Synthetic peptide
  XENP019393 vhCDR3
GRGMGYFDY

SEQ ID NO: 22226 - protein, 214 aa, Artificial Sequence; identical to SEQ ID NO: 21836
  Description of Artificial Sequence: Synthetic polypeptide
  XENP019393 11B2_H1_1H11_L1_IgG1_PVA_/S267K Light Chain

SEQ ID NO: 22227 - protein, 107 aa, Artificial Sequence; identical to SEQ ID NO: 21837
  Description of Artificial Sequence: Synthetic polypeptide
  VL of XENP019393

SEQ ID NO: 22228 - protein, 11 aa, Artificial Sequence
  Description of Artificial Sequence: Synthetic peptide
  XENP019393 vlCDR1
RASENIYSNLA

SEQ ID NO: 22229 - protein, 7 aa, Artificial Sequence
  Description of Artificial Sequence: Synthetic peptide
  XENP019393 vlCDR2
AATNLAD

SEQ ID NO: 22230 - protein, 9 aa, Artificial Sequence
  Description of Artificial Sequence: Synthetic peptide
  XENP019393 vlCDR3
QHFWTTPRT

SEQ ID NO: 22231 - protein, 447 aa, Artificial Sequence
  Description of Artificial Sequence: Synthetic polypeptide
  XENP019394 2D4_H1L1_IgG1_PVA_/S267K Heavy Chain
QIQLVQSGSELKKPGASVKVSCKASGYTFTNYGMNWVRQAPGQGLEWMGWINTYTGEPTYADGFTGRFVFSLDTSVSTAYLQISSLKAEDTAVYFCARGRGTGYFDNWGQGTLVTVSSASTKGPSVFPLAPSSKSTSGGTAALGCLVKDYFPEPVTVSWNSGALTSGVHTFPAVLQSSGLYSLSSVVTVPSSSLGTQTYICNVNHKPSDTKVDKKVEPKSCDKTHTCPPCPAPPVAGPSVFLFPPKPKDTLMISRTPEVTCVVVDVKHEDPEVKFNWYVDGVEVHNAKTKPREEEYNSTYRVVSVLTVLHQDWLNGKEYKCKVSNKALPAPIEKTISKAKGQPREPQVYTLPPSREEMTKNQVSLTCDVSGFYPSDIAVEWESDGQPENNYKTTPPVLDSDGSFFLYSKLTVDKSRWEQGDVFSCSVMHEALHNHYTQKSLSLSPGK

SEQ ID NO: 22232 - protein, 118 aa, Artificial Sequence
  Description of Artificial Sequence: Synthetic polypeptide
  VH of XENP019394
QIQLVQSGSELKKPGASVKVSCKASGYTFTNYGMNWVRQAPGQGLEWMGWINTYTGEPTYADGFTGRFVFSLDTSVSTAYLQISSLKAEDTAVYFCARGRGTGYFDNWGQGTLVTVSS

SEQ ID NO: 22233 - protein, 5 aa, Artificial Sequence
  Description of Artificial Sequence: Synthetic peptide
  XENP019394 vhCDR1
NYGMN

SEQ ID NO: 22234 - protein, 17 aa, Artificial Sequence
  Description of Artificial Sequence: Synthetic peptide
  XENP019394 vhCDR2
WINTYTGEPTYADGFTG

SEQ ID NO: 22235 - protein, 9 aa, Artificial Sequence
  Description of Artificial Sequence: Synthetic peptide
  XENP019394 vhCDR3
GRGTGYFDN

SEQ ID NO: 22236 - protein, 214 aa, Artificial Sequence
  Description of Artificial Sequence: Synthetic polypeptide
  XENP019394 2D4_H1L1_IgG1_PVA_/S267K Light Chain
DIQMTQSPSSLSASVGDRVTITCRASENIYSNLAWYQQKPGKSPKLLVYAATNLADGVPSRFSGSGSGTDYTLTISSLQPEDFATYYCQHFWVTPRTFGGGTKVEIKRTVAAPSVFIFPPSDEQLKSGTASVVCLLNNFYPREAKVQWKVDNALQSGNSQESVTEQDSKDSTYSLSSTLTLSKADYEKHKVYACEVTHQGLSSPVTKSFNRGEC

SEQ ID NO: 22237 - protein, 107 aa, Artificial Sequence
  Description of Artificial Sequence: Synthetic polypeptide
  VL of XENP019394
DIQMTQSPSSLSASVGDRVTITCRASENIYSNLAWYQQKPGKSPKLLVYAATNLADGVPSRFSGSGSGTDYTLTISSLQPEDFATYYCQHFWVTPRTFGGGTKVEIK

SEQ ID NO: 22238 - protein, 11 aa, Artificial Sequence
  Description of Artificial Sequence: Synthetic peptide
  XENP019394 vlCDR1
RASENIYSNLA

SEQ ID NO: 22239 - protein, 7 aa, Artificial Sequence
  Description of Artificial Sequence: Synthetic peptide
  XENP019394 vlCDR2
AATNLAD

SEQ ID NO: 22240 - protein, 9 aa, Artificial Sequence
  Description of Artificial Sequence: Synthetic peptide
  XENP019394 vlCDR3
QHFWVTPRT

SEQ ID NO: 22241 - protein, 447 aa, Artificial Sequence
  Description of Artificial Sequence: Synthetic polypeptide
  XENP019395 4H9_H1L1_IgG1_PVA_/S267K Heavy Chain
QIQLVQSGSELKKPGASVKVSCKASEYAFINYGMNWVRQAPGQGLEWMGWINTYTGEPTYADGFTGRFVFSLDTSVSTAYLQISSLKAEDTAVYFCARGRGTGYFDYWGQGTLVTVSSASTKGPSVFPLAPSSKSTSGGTAALGCLVKDYFPEPVTVSWNSGALTSGVHTFPAVLQSSGLYSLSSVVTVPSSSLGTQTYICNVNHKPSDTKVDKKVEPKSCDKTHTCPPCPAPPVAGPSVFLFPPKPKDTLMISRTPEVTCVVVDVKHEDPEVKFNWYVDGVEVHNAKTKPREEEYNSTYRVVSVLTVLHQDWLNGKEYKCKVSNKALPAPIEKTISKAKGQPREPQVYTLPPSREEMTKNQVSLTCDVSGFYPSDIAVEWESDGQPENNYKTTPPVLDSDGSFFLYSKLTVDKSRWEQGDVFSCSVMHEALHNHYTQKSLSLSPGK

SEQ ID NO: 22242 - protein, 118 aa, Artificial Sequence
  Description of Artificial Sequence: Synthetic polypeptide
  VH of XENP019395
QIQLVQSGSELKKPGASVKVSCKASEYAFINYGMNWVRQAPGQGLEWMGWINTYTGEPTYADGFTGRFVFSLDTSVSTAYLQISSLKAEDTAVYFCARGRGTGYFDYWGQGTLVTVSS

SEQ ID NO: 22243 - protein, 5 aa, Artificial Sequence
  Description of Artificial Sequence: Synthetic peptide
  XENP019395 vhCDR1
NYGMN

SEQ ID NO: 22244 - protein, 17 aa, Artificial Sequence
  Description of Artificial Sequence: Synthetic peptide
  XENP019395 vhCDR2
WINTYTGEPTYADGFTG

SEQ ID NO: 22245 - protein, 9 aa, Artificial Sequence
  Description of Artificial Sequence: Synthetic peptide
  XENP019395 vhCDR3
GRGTGYFDY

SEQ ID NO: 22246 - protein, 214 aa, Artificial Sequence
  Description of Artificial Sequence: Synthetic polypeptide
  XENP019395 4H9_H1L1_IgG1_PVA_/S267K Light Chain
DIVMTQSPSSLSASVGDRVTITCRASQDVSTAVAWYQQKPGKSPKLLIYSASYRYTGVPDRFSGSGSGTDFTLTISSLQPEDFATYSCQQHYSTSRTFGGGTKVEIKRTVAAPSVFIFPPSDEQLKSGTASVVCLLNNFYPREAKVQWKVDNALQSGNSQESVTEQDSKDSTYSLSSTLTLSKADYEKHKVYACEVTHQGLSSPVTKSFNRGEC

SEQ ID NO: 22247 - protein, 107 aa, Artificial Sequence
  Description of Artificial Sequence: Synthetic polypeptide
  VL of XENP019395
DIVMTQSPSSLSASVGDRVTITCRASQDVSTAVAWYQQKPGKSPKLLIYSASYRYTGVPDRFSGSGSGTDFTLTISSLQPEDFATYSCQQHYSTSRTFGGGTKVEIK

SEQ ID NO: 22248 - protein, 11 aa, Artificial Sequence
  Description of Artificial Sequence: Synthetic peptide
  XENP019395 vlCDR1
RASQDVSTAVA

SEQ ID NO: 22249 - protein, 7 aa, Artificial Sequence
  Description of Artificial Sequence: Synthetic peptide
  XENP019395 vlCDR2
SASYRYT

SEQ ID NO: 22250 - protein, 9 aa, Artificial Sequence
  Description of Artificial Sequence: Synthetic peptide
  XENP019395 vlCDR3
QQHYSTSRT

SEQ ID NO: 22251 - protein, 447 aa, Artificial Sequence; identical to SEQ ID NO: 22241
  Description of Artificial Sequence: Synthetic polypeptide
  XENP019396 4H9_H1L2_IgG1_PVA_/S267K Heavy Chain

SEQ ID NO: 22252 - protein, 118 aa, Artificial Sequence; identical to SEQ ID NO: 22242
  Description of Artificial Sequence: Synthetic polypeptide
  VH of XENP019396

SEQ ID NO: 22253 - protein, 5 aa, Artificial Sequence
  Description of Artificial Sequence: Synthetic peptide
  XENP019396 vhCDR1
NYGMN

SEQ ID NO: 22254 - protein, 17 aa, Artificial Sequence
  Description of Artificial Sequence: Synthetic peptide
  XENP019396 vhCDR2
WINTYTGEPTYADGFTG

SEQ ID NO: 22255 - protein, 9 aa, Artificial Sequence
  Description of Artificial Sequence: Synthetic peptide
  XENP019396 vhCDR3
GRGTGYFDY

SEQ ID NO: 22256 - protein, 214 aa, Artificial Sequence
  Description of Artificial Sequence: Synthetic polypeptide
  XENP019396 4H9_H1L2_IgG1_PVA_/S267K Light Chain
DIVMTQSPDSLAVSLGERATINCKASQDVSTAVAWYQQKPGQSPKLLIYSASYRYTGVPDRFSGSGSGTDFTLTISSLQAEDVAVYSCQQHYSTSRTFGGGTKVEIKRTVAAPSVFIFPPSDEQLKSGTASVVCLLNNFYPREAKVQWKVDNALQSGNSQESVTEQDSKDSTYSLSSTLTLSKADYEKHKVYACEVTHQGLSSPVTKSFNRGEC

SEQ ID NO: 22257 - protein, 107 aa, Artificial Sequence
  Description of Artificial Sequence: Synthetic polypeptide
  VL of XENP019396
DIVMTQSPDSLAVSLGERATINCKASQDVSTAVAWYQQKPGQSPKLLIYSASYRYTGVPDRFSGSGSGTDFTLTISSLQAEDVAVYSCQQHYSTSRTFGGGTKVEIK

SEQ ID NO: 22258 - protein, 11 aa, Artificial Sequence
  Description of Artificial Sequence: Synthetic peptide
  XENP019396 vlCDR1
KASQDVSTAVA

SEQ ID NO: 22259 - protein, 7 aa, Artificial Sequence
  Description of Artificial Sequence: Synthetic peptide
  XENP019396 vlCDR2
SASYRYT

SEQ ID NO: 22260 - protein, 9 aa, Artificial Sequence
  Description of Artificial Sequence: Synthetic peptide
  XENP019396 vlCDR3
QQHYSTSRT

SEQ ID NO: 22261 - protein, 450 aa, Artificial Sequence
  Description of Artificial Sequence: Synthetic polypeptide
  XENP019401 7G8_H0L0_IgG1_PVA_/S267K Heavy Chain
EVKLEESGGGLVQPGGSMKLSCAASGFTFSDAWMDWVRQSPEKGLEWVAEIRTKANNHATYYAESVKGRFTISRDDSKSSVYLQMNSLRAEDTGIYYCTRLANWDWYFDVWGAGTTVTVSSASTKGPSVFPLAPSSKSTSGGTAALGCLVKDYFPEPVTVSWNSGALTSGVHTFPAVLQSSGLYSLSSVVTVPSSSLGTQTYICNVNHKPSDTKVDKKVEPKSCDKTHTCPPCPAPPVAGPSVFLFPPKPKDTLMISRTPEVTCVVVDVKHEDPEVKFNWYVDGVEVHNAKTKPREEEYNSTYRVVSVLTVLHQDWLNGKEYKCKVSNKALPAPIEKTISKAKGQPREPQVYTLPPSREEMTKNQVSLTCDVSGFYPSDIAVEWESDGQPENNYKTTPPVLDSDGSFFLYSKLTVDKSRWEQGDVFSCSVMHEALHNHYTQKSLSLSPGK

SEQ ID NO: 22262 - protein, 121 aa, Artificial Sequence
  Description of Artificial Sequence: Synthetic polypeptide
  VH of XENP019401
EVKLEESGGGLVQPGGSMKLSCAASGFTFSDAWMDWVRQSPEKGLEWVAEIRTKANNHATYYAESVKGRFTISRDDSKSSVYLQMNSLRAEDTGIYYCTRLANWDWYFDVWGAGTTVTVSS

SEQ ID NO: 22263 - protein, 5 aa, Artificial Sequence
  Description of Artificial Sequence: Synthetic peptide
  XENP019401 vhCDR1
DAWMD

SEQ ID NO: 22264 - protein, 19 aa, Artificial Sequence
  Description of Artificial Sequence: Synthetic peptide
  XENP019401 vhCDR2
EIRTKANNHATYYAESVKG

SEQ ID NO: 22265 - protein, 10 aa, Artificial Sequence
  Description of Artificial Sequence: Synthetic peptide
  XENP019401 vhCDR3
LANWDWYFDV

SEQ ID NO: 22266 - protein, 218 aa, Artificial Sequence
  Description of Artificial Sequence: Synthetic polypeptide
  XENP019401 7G8_H0L0_IgG1_PVA_/S267K Light Chain
DTVLTQSPASLAVSLGQRATISCKASQSVDYDGDSYMNWYQQKPGQPPKLLIYAASNLESGIPARLSGSGSGTDFTLNIHPVEEEDAATYYCQQSNEDPFTFGSGTKLEVKRTVAAPSVFIFPPSDEQLKSGTASVVCLLNNFYPREAKVQWKVDNALQSGNSQESVTEQDSKDSTYSLSSTLTLSKADYEKHKVYACEVTHQGLSSPVTKSFNRGEC

SEQ ID NO: 22267 - protein, 111 aa, Artificial Sequence
  Description of Artificial Sequence: Synthetic polypeptide
  VL of XENP019401
DTVLTQSPASLAVSLGQRATISCKASQSVDYDGDSYMNWYQQKPGQPPKLLIYAASNLESGIPARLSGSGSGTDFTLNIHPVEEEDAATYYCQQSNEDPFTFGSGTKLEVK

SEQ ID NO: 22268 - protein, 15 aa, Artificial Sequence
  Description of Artificial Sequence: Synthetic peptide
  XENP019401 vlCDR1
KASQSVDYDGDSYMN

SEQ ID NO: 22269 - protein, 7 aa, Artificial Sequence
  Description of Artificial Sequence: Synthetic peptide
  XENP019401 vlCDR2
AASNLES

SEQ ID NO: 22270 - protein, 9 aa, Artificial Sequence
  Description of Artificial Sequence: Synthetic peptide
  XENP019401 vlCDR3
QQSNEDPFT

SEQ ID NO: 22271 - protein, 450 aa, Artificial Sequence
  Description of Artificial Sequence: Synthetic polypeptide
  XENP019402 7G8_H1L1_IgG1_PVA_/S267K Heavy Chain
QVQLVQSGAEVKKPGASVKVSCKASGFTFSDAWMDWVRQAPGQGLEWMGEIRTKANNHATYYAEKFQGRVTMTRDDSTSTVYMELSSLRSEDTAVYYCTRLANWDWYFDVWGAGTTVTVSSASTKGPSVFPLAPSSKSTSGGTAALGCLVKDYFPEPVTVSWNSGALTSGVHTFPAVLQSSGLYSLSSVVTVPSSSLGTQTYICNVNHKPSDTKVDKKVEPKSCDKTHTCPPCPAPPVAGPSVFLFPPKPKDTLMISRTPEVTCVVVDVKHEDPEVKFNWYVDGVEVHNAKTKPREEEYNSTYRVVSVLTVLHQDWLNGKEYKCKVSNKALPAPIEKTISKAKGQPREPQVYTLPPSREEMTKNQVSLTCDVSGFYPSDIAVEWESDGQPENNYKTTPPVLDSDGSFFLYSKLTVDKSRWEQGDVFSCSVMHEALHNHYTQKSLSLSPGK

SEQ ID NO: 22272 - protein, 121 aa, Artificial Sequence
  Description of Artificial Sequence: Synthetic polypeptide
  VH of XENP019402
QVQLVQSGAEVKKPGASVKVSCKASGFTFSDAWMDWVRQAPGQGLEWMGEIRTKANNHATYYAEKFQGRVTMTRDDSTSTVYMELSSLRSEDTAVYYCTRLANWDWYFDVWGAGTTVTVSS

SEQ ID NO: 22273 - protein, 5 aa, Artificial Sequence
  Description of Artificial Sequence: Synthetic peptide
  XENP019402 vhCDR1
DAWMD

SEQ ID NO: 22274 - protein, 19 aa, Artificial Sequence
  Description of Artificial Sequence: Synthetic peptide
  XENP019402 vhCDR2
EIRTKANNHATYYAEKFQG

SEQ ID NO: 22275 - protein, 10 aa, Artificial Sequence
  Description of Artificial Sequence: Synthetic peptide
  XENP019402 vhCDR3
LANWDWYFDV

SEQ ID NO: 22276 - protein, 218 aa, Artificial Sequence
  Description of Artificial Sequence: Synthetic polypeptide
  XENP019402 7G8_H1L1_IgG1_PVA_/S267K Light Chain
DTVLTQSPSSLSASVGDRVTITCRASQSVDYDGDSYMNWYQQKPGKPPKLLIYAASNLESGIPARLSGSGSGTDFTLTISSLQPEDFATYYCQQSNEDPFTFGSGTKLEIKRTVAAPSVFIFPPSDEQLKSGTASVVCLLNNFYPREAKVQWKVDNALQSGNSQESVTEQDSKDSTYSLSSTLTLSKADYEKHKVYACEVTHQGLSSPVTKSFNRGEC

SEQ ID NO: 22277 - protein, 111 aa, Artificial Sequence
  Description of Artificial Sequence: Synthetic polypeptide
  VL of XENP019402
DTVLTQSPSSLSASVGDRVTITCRASQSVDYDGDSYMNWYQQKPGKPPKLLIYAASNLESGIPARLSGSGSGTDFTLTISSLQPEDFATYYCQQSNEDPFTFGSGTKLEIK

SEQ ID NO: 22278 - protein, 15 aa, Artificial Sequence
  Description of Artificial Sequence: Synthetic peptide
  XENP019402 vlCDR1
RASQSVDYDGDSYMN

SEQ ID NO: 22279 - protein, 7 aa, Artificial Sequence
  Description of Artificial Sequence: Synthetic peptide
  XENP019402 vlCDR2
AASNLES

SEQ ID NO: 22280 - protein, 9 aa, Artificial Sequence
  Description of Artificial Sequence: Synthetic peptide
  XENP019402 vlCDR3
QQSNEDPFT

SEQ ID NO: 22281 - protein, 450 aa, Artificial Sequence; identical to SEQ ID NO: 22271
  Description of Artificial Sequence: Synthetic polypeptide
  XENP019403 7G8_H1L2_IgG1_PVA_/S267K Heavy Chain

SEQ ID NO: 22282 - protein, 121 aa, Artificial Sequence; identical to SEQ ID NO: 22272
  Description of Artificial Sequence: Synthetic polypeptide
  VH of XENP019403

SEQ ID NO: 22283 - protein, 5 aa, Artificial Sequence
  Description of Artificial Sequence: Synthetic peptide
  XENP019403 vhCDR1
DAWMD

SEQ ID NO: 22284 - protein, 19 aa, Artificial Sequence
  Description of Artificial Sequence: Synthetic peptide
  XENP019403 vhCDR2
EIRTKANNHATYYAEKFQG

SEQ ID NO: 22285 - protein, 10 aa, Artificial Sequence
  Description of Artificial Sequence: Synthetic peptide
  XENP019403 vhCDR3
LANWDWYFDV

SEQ ID NO: 22286 - protein, 218 aa, Artificial Sequence
  Description of Artificial Sequence: Synthetic polypeptide
  XENP019403 7G8_H1L2_IgG1_PVA_/S267K Light Chain
DTVLTQSPATLSLSPGERATLSCRASQSVDYDGDSYMNWYQQKPGQPPRLLIYAASNLESGIPARLSGSGSGTDFTLTISSLEPEDFAVYYCQQSNEDPFTFGSGTKLEIKRTVAAPSVFIFPPSDEQLKSGTASVVCLLNNFYPREAKVQWKVDNALQSGNSQESVTEQDSKDSTYSLSSTLTLSKADYEKHKVYACEVTHQGLSSPVTKSFNRGEC

SEQ ID NO: 22287 - protein, 111 aa, Artificial Sequence
  Description of Artificial Sequence: Synthetic polypeptide
  VL of XENP019403
DTVLTQSPATLSLSPGERATLSCRASQSVDYDGDSYMNWYQQKPGQPPRLLIYAASNLESGIPARLSGSGSGTDFTLTISSLEPEDFAVYYCQQSNEDPFTFGSGTKLEIK

SEQ ID NO: 22288 - protein, 15 aa, Artificial Sequence
  Description of Artificial Sequence: Synthetic peptide
  XENP019403 vlCDR1
RASQSVDYDGDSYMN

SEQ ID NO: 22289 - protein, 7 aa, Artificial Sequence
  Description of Artificial Sequence: Synthetic peptide
  XENP019403 vlCDR2
AASNLES

SEQ ID NO: 22290 - protein, 9 aa, Artificial Sequence
  Description of Artificial Sequence: Synthetic peptide
  XENP019403 vlCDR3
QQSNEDPFT

SEQ ID NO: 22291 - protein, 450 aa, Artificial Sequence; identical to SEQ ID NO: 22271
  Description of Artificial Sequence: Synthetic polypeptide
  XENP019404 7G8_H1L3_IgG1_PVA_/S267K Heavy Chain

SEQ ID NO: 22292 - protein, 121 aa, Artificial Sequence; identical to SEQ ID NO: 22272
  Description of Artificial Sequence: Synthetic polypeptide
  VH of XENP019404

SEQ ID NO: 22293 - protein, 5 aa, Artificial Sequence
  Description of Artificial Sequence: Synthetic peptide
  XENP019404 vhCDR1
DAWMD

SEQ ID NO: 22294 - protein, 19 aa, Artificial Sequence
  Description of Artificial Sequence: Synthetic peptide
  XENP019404 vhCDR2
EIRTKANNHATYYAEKFQG

SEQ ID NO: 22295 - protein, 10 aa, Artificial Sequence
  Description of Artificial Sequence: Synthetic peptide
  XENP019404 vhCDR3
LANWDWYFDV

SEQ ID NO: 22296 - protein, 218 aa, Artificial Sequence
  Description of Artificial Sequence: Synthetic polypeptide
  XENP019404 7G8_H1L3_IgG1_PVA_/S267K Light Chain
DTVLTQSPDSLAVSLGERATINCKASQSVDYDGDSYMNWYQQKPGQPPKLLIYAASNLESGIPARLSGSGSGTDFTLTISSLQAEDVAVYYCQQSNEDPFTFGSGTKLEIKRTVAAPSVFIFPPSDEQLKSGTASVVCLLNNFYPREAKVQWKVDNALQSGNSQESVTEQDSKDSTYSLSSTLTLSKADYEKHKVYACEVTHQGLSSPVTKSFNRGEC

SEQ ID NO: 22297 - protein, 111 aa, Artificial Sequence
  Description of Artificial Sequence: Synthetic polypeptide
  VL of XENP019404
DTVLTQSPDSLAVSLGERATINCKASQSVDYDGDSYMNWYQQKPGQPPKLLIYAASNLESGIPARLSGSGSGTDFTLTISSLQAEDVAVYYCQQSNEDPFTFGSGTKLEIK

SEQ ID NO: 22298 - protein, 15 aa, Artificial Sequence
  Description of Artificial Sequence: Synthetic peptide
  XENP019404 vlCDR1
KASQSVDYDGDSYMN

SEQ ID NO: 22299 - protein, 7 aa, Artificial Sequence
  Description of Artificial Sequence: Synthetic peptide
  XENP019404 vlCDR2
AASNLES

SEQ ID NO: 22300 - protein, 9 aa, Artificial Sequence
  Description of Artificial Sequence: Synthetic peptide
  XENP019404 vlCDR3
QQSNEDPFT

SEQ ID NO: 22301 - protein, 450 aa, Artificial Sequence
  Description of Artificial Sequence: Synthetic polypeptide
  XENP019405 7G8_H2L1_IgG1_PVA_/S267K Heavy Chain
EVQLVESGGGLVQPGGSLRLSCAASGFTFSDAWMDWVRQAPGKGLEWVGEIRTKANNHATYYAESVKGRFTISRDDSKSSVYLQMNSLKTEDTAVYYCTRLANWDWYFDVWGAGTTVTVSSASTKGPSVFPLAPSSKSTSGGTAALGCLVKDYFPEPVTVSWNSGALTSGVHTFPAVLQSSGLYSLSSVVTVPSSSLGTQTYICNVNHKPSDTKVDKKVEPKSCDKTHTCPPCPAPPVAGPSVFLFPPKPKDTLMISRTPEVTCVVVDVKHEDPEVKFNWYVDGVEVHNAKTKPREEEYNSTYRVVSVLTVLHQDWLNGKEYKCKVSNKALPAPIEKTISKAKGQPREPQVYTLPPSREEMTKNQVSLTCDVSGFYPSDIAVEWESDGQPENNYKTTPPVLDSDGSFFLYSKLTVDKSRWEQGDVFSCSVMHEALHNHYTQKSLSLSPGK

SEQ ID NO: 22302 - protein, 121 aa, Artificial Sequence
  Description of Artificial Sequence: Synthetic polypeptide
  VH of XENP019405
EVQLVESGGGLVQPGGSLRLSCAASGFTFSDAWMDWVRQAPGKGLEWVGEIRTKANNHATYYAESVKGRFTISRDDSKSSVYLQMNSLKTEDTAVYYCTRLANWDWYFDVWGAGTTVTVSS

SEQ ID NO: 22303 - protein, 5 aa, Artificial Sequence
  Description of Artificial Sequence: Synthetic peptide
  XENP019405 vhCDR1
DAWMD

SEQ ID NO: 22304 - protein, 19 aa, Artificial Sequence
  Description of Artificial Sequence: Synthetic peptide
  XENP019405 vhCDR2
EIRTKANNHATYYAESVKG

SEQ ID NO: 22305 - protein, 10 aa, Artificial Sequence
  Description of Artificial Sequence: Synthetic peptide
  XENP019405 vhCDR3
LANWDWYFDV

SEQ ID NO: 22306 - protein, 218 aa, Artificial Sequence; identical to SEQ ID NO: 22276
  Description of Artificial Sequence: Synthetic polypeptide
  XENP019405 7G8_H2L1_IgG1_PVA_/S267K Light Chain

SEQ ID NO: 22307 - protein, 111 aa, Artificial Sequence; identical to SEQ ID NO: 22277
  Description of Artificial Sequence: Synthetic polypeptide
  VL of XENP019405

SEQ ID NO: 22308 - protein, 15 aa, Artificial Sequence
  Description of Artificial Sequence: Synthetic peptide
  XENP019405 vlCDR1
RASQSVDYDGDSYMN

SEQ ID NO: 22309 - protein, 7 aa, Artificial Sequence
  Description of Artificial Sequence: Synthetic peptide
  XENP019405 vlCDR2
AASNLES

SEQ ID NO: 22310 - protein, 9 aa, Artificial Sequence
  Description of Artificial Sequence: Synthetic peptide
  XENP019405 vlCDR3
QQSNEDPFT

SEQ ID NO: 22311 - protein, 450 aa, Artificial Sequence; identical to SEQ ID NO: 22301
  Description of Artificial Sequence: Synthetic polypeptide
  XENP019406 7G8_H2L2_IgG1_PVA_/S267K Heavy Chain

SEQ ID NO: 22312 - protein, 121 aa, Artificial Sequence; identical to SEQ ID NO: 22302
  Description of Artificial Sequence: Synthetic polypeptide
  VH of XENP019406

SEQ ID NO: 22313 - protein, 5 aa, Artificial Sequence
  Description of Artificial Sequence: Synthetic peptide
  XENP019406 vhCDR1
DAWMD

SEQ ID NO: 22314 - protein, 19 aa, Artificial Sequence
  Description of Artificial Sequence: Synthetic peptide
  XENP019406 vhCDR2
EIRTKANNHATYYAESVKG

SEQ ID NO: 22315 - protein, 10 aa, Artificial Sequence
  Description of Artificial Sequence: Synthetic peptide
  XENP019406 vhCDR3
LANWDWYFDV

SEQ ID NO: 22316 - protein, 218 aa, Artificial Sequence; identical to SEQ ID NO: 22286
  Description of Artificial Sequence: Synthetic polypeptide
  XENP019406 7G8_H2L2_IgG1_PVA_/S267K Light Chain

SEQ ID NO: 22317 - protein, 111 aa, Artificial Sequence; identical to SEQ ID NO: 22287
  Description of Artificial Sequence: Synthetic polypeptide
  VL of XENP019406

SEQ ID NO: 22318 - protein, 15 aa, Artificial Sequence
  Description of Artificial Sequence: Synthetic peptide
  XENP019406 vlCDR1
RASQSVDYDGDSYMN

SEQ ID NO: 22319 - protein, 7 aa, Artificial Sequence
  Description of Artificial Sequence: Synthetic peptide
  XENP019406 vlCDR2
AASNLES

SEQ ID NO: 22320 - protein, 9 aa, Artificial Sequence
  Description of Artificial Sequence: Synthetic peptide
  XENP019406 vlCDR3
QQSNEDPFT

SEQ ID NO: 22321 - protein, 450 aa, Artificial Sequence; identical to SEQ ID NO: 22301
  Description of Artificial Sequence: Synthetic polypeptide
  XENP019407 7G8_H2L3_IgG1_PVA_/S267K Heavy Chain

SEQ ID NO: 22322 - protein, 121 aa, Artificial Sequence; identical to SEQ ID NO: 22302
  Description of Artificial Sequence: Synthetic polypeptide
  VH of XENP019407

SEQ ID NO: 22323 - protein, 5 aa, Artificial Sequence
  Description of Artificial Sequence: Synthetic peptide
  XENP019407 vhCDR1
DAWMD

SEQ ID NO: 22324 - protein, 19 aa, Artificial Sequence
  Description of Artificial Sequence: Synthetic peptide
  XENP019407 vhCDR2
EIRTKANNHATYYAESVKG

SEQ ID NO: 22325 - protein, 10 aa, Artificial Sequence
  Description of Artificial Sequence: Synthetic peptide
  XENP019407 vhCDR3
LANWDWYFDV

SEQ ID NO: 22326 - protein, 218 aa, Artificial Sequence; identical to SEQ ID NO: 22296
  Description of Artificial Sequence: Synthetic polypeptide
  XENP019407 7G8_H2L3_IgG1_PVA_/S267K Light Chain

SEQ ID NO: 22327 - protein, 111 aa, Artificial Sequence; identical to SEQ ID NO: 22297
  Description of Artificial Sequence: Synthetic polypeptide
  VL of XENP019407

SEQ ID NO: 22328 - protein, 15 aa, Artificial Sequence
  Description of Artificial Sequence: Synthetic peptide
  XENP019407 vlCDR1
KASQSVDYDGDSYMN

SEQ ID NO: 22329 - protein, 7 aa, Artificial Sequence
  Description of Artificial Sequence: Synthetic peptide
  XENP019407 vlCDR2
AASNLES

SEQ ID NO: 22330 - protein, 9 aa, Artificial Sequence
  Description of Artificial Sequence: Synthetic peptide
  XENP019407 vlCDR3
QQSNEDPFT

SEQ ID NO: 22331 - protein, 446 aa, Artificial Sequence
  Description of Artificial Sequence: Synthetic polypeptide
  XENP019408 11C12_H1L1_IgG1_PVA_/S267K Heavy Chain
EVQLVESGGGLVQPGGSLRLSCAASGFTFSSFGMHWVRQAPGKGLEWVSYISSDSSTFSYADSVKGRFTISRDNAKNSLYLQMNSLRAEDTAVYYCARYYYGYVDFWGQGTTVTVSSASTKGPSVFPLAPSSKSTSGGTAALGCLVKDYFPEPVTVSWNSGALTSGVHTFPAVLQSSGLYSLSSVVTVPSSSLGTQTYICNVNHKPSDTKVDKKVEPKSCDKTHTCPPCPAPPVAGPSVFLFPPKPKDTLMISRTPEVTCVVVDVKHEDPEVKFNWYVDGVEVHNAKTKPREEEYNSTYRVVSVLTVLHQDWLNGKEYKCKVSNKALPAPIEKTISKAKGQPREPQVYTLPPSREEMTKNQVSLTCDVSGFYPSDIAVEWESDGQPENNYKTTPPVLDSDGSFFLYSKLTVDKSRWEQGDVFSCSVMHEALHNHYTQKSLSLSPGK

SEQ ID NO: 22332 - protein, 117 aa, Artificial Sequence
  Description of Artificial Sequence: Synthetic polypeptide
  VH of XENP019408
EVQLVESGGGLVQPGGSLRLSCAASGFTFSSFGMHWVRQAPGKGLEWVSYISSDSSTFSYADSVKGRFTISRDNAKNSLYLQMNSLRAEDTAVYYCARYYYGYVDFWGQGTTVTVSS

SEQ ID NO: 22333 - protein, 5 aa, Artificial Sequence
  Description of Artificial Sequence: Synthetic peptide
  XENP019408 vhCDR1
SFGMH

SEQ ID NO: 22334 - protein, 17 aa, Artificial Sequence
  Description of Artificial Sequence: Synthetic peptide
  XENP019408 vhCDR2
YISSDSSTFSYADSVKG

SEQ ID NO: 22335 - protein, 8 aa, Artificial Sequence
  Description of Artificial Sequence: Synthetic peptide
  XENP019408 vhCDR3
YYYGYVDF

SEQ ID NO: 22336 - protein, 214 aa, Artificial Sequence
  Description of Artificial Sequence: Synthetic polypeptide
  XENP019408 11C12_H1L1_IgG1_PVA_/S267K Light Chain
DIQMTQSPSSLSASVGDRVTITCRASEDIYNRLAWYQQKPGKAPKLLISGATSFETGVPSRFSGSGSGKDYTLTISSLQPEDFATYYCQQYWSTPWTFGGGTKVEIKRTVAAPSVFIFPPSDEQLKSGTASVVCLLNNFYPREAKVQWKVDNALQSGNSQESVTEQDSKDSTYSLSSTLTLSKADYEKHKVYACEVTHQGLSSPVTKSFNRGEC

SEQ ID NO: 22337 - protein, 107 aa, Artificial Sequence
  Description of Artificial Sequence: Synthetic polypeptide
  VL of XENP019408
DIQMTQSPSSLSASVGDRVTITCRASEDIYNRLAWYQQKPGKAPKLLISGATSFETGVPSRFSGSGSGKDYTLTISSLQPEDFATYYCQQYWSTPWTFGGGTKVEIK

SEQ ID NO: 22338 - protein, 11 aa, Artificial Sequence
  Description of Artificial Sequence: Synthetic peptide
  XENP019408 vlCDR1
RASEDIYNRLA

SEQ ID NO: 22339 - protein, 7 aa, Artificial Sequence
  Description of Artificial Sequence: Synthetic peptide
  XENP019408 vlCDR2
GATSFET

SEQ ID NO: 22340 - protein, 9 aa, Artificial Sequence
  Description of Artificial Sequence: Synthetic peptide
  XENP019408 vlCDR3
QQYWSTPWT

SEQ ID NO: 22341 - protein, 447 aa, Artificial Sequence; identical to SEQ ID NO: 2885
  Description of Artificial Sequence: Synthetic polypeptide
  XENP020023 2A11_H1L0_IgG1_PVA_/S267K Heavy Chain

SEQ ID NO: 22342 - protein, 118 aa, Artificial Sequence; identical to SEQ ID NO: 2686
  Description of Artificial Sequence: Synthetic polypeptide
  VH of XENP020023

SEQ ID NO: 22343 - protein, 5 aa, Artificial Sequence
  Description of Artificial Sequence: Synthetic peptide
  XENP020023 vhCDR1
DYYMH

SEQ ID NO: 22344 - protein, 17 aa, Artificial Sequence
  Description of Artificial Sequence: Synthetic peptide
  XENP020023 vhCDR2
WIDPENGDTEYAPKFQG

SEQ ID NO: 22345 - protein, 9 aa, Artificial Sequence
  Description of Artificial Sequence: Synthetic peptide
  XENP020023 vhCDR3
RGVRQALDY

SEQ ID NO: 22346 - protein, 214 aa, Artificial Sequence; identical to SEQ ID NO: 21906
  Description of Artificial Sequence: Synthetic polypeptide
  XENP020023 2A11_H1L0_IgG1_PVA_/S267K Light Chain

SEQ ID NO: 22347 - protein, 107 aa, Artificial Sequence; identical to SEQ ID NO: 21907
  Description of Artificial Sequence: Synthetic polypeptide
  VL of XENP020023

SEQ ID NO: 22348 - protein, 11 aa, Artificial Sequence
  Description of Artificial Sequence: Synthetic peptide
  XENP020023 vlCDR1
RASQDIGNYLN

SEQ ID NO: 22349 - protein, 7 aa, Artificial Sequence
  Description of Artificial Sequence: Synthetic peptide
  XENP020023 vlCDR2
YTSRLHS

SEQ ID NO: 22350 - protein, 9 aa, Artificial Sequence
  Description of Artificial Sequence: Synthetic peptide
  XENP020023 vlCDR3
QQGNTLPYT

SEQ ID NO: 22351 - protein, 447 aa, Artificial Sequence; identical to SEQ ID NO: 21901
  Description of Artificial Sequence: Synthetic polypeptide
  XENP020024 2A11_H0L1_IgG1_PVA_/S267K Heavy Chain

SEQ ID NO: 22352 - protein, 118 aa, Artificial Sequence; identical to SEQ ID NO: 21902
  Description of Artificial Sequence: Synthetic polypeptide
  VH of XENP020024

SEQ ID NO: 22353 - protein, 5 aa, Artificial Sequence
  Description of Artificial Sequence: Synthetic peptide
  XENP020024 vhCDR1
DYYMH

SEQ ID NO: 22354 - protein, 17 aa, Artificial Sequence
  Description of Artificial Sequence: Synthetic peptide
  XENP020024 vhCDR2
WIDPENGDTEYAPKFQG

SEQ ID NO: 22355 - protein, 9 aa, Artificial Sequence
  Description of Artificial Sequence: Synthetic peptide
  XENP020024 vhCDR3
RGVRQALDY

SEQ ID NO: 22356 - protein, 214 aa, Artificial Sequence; identical to SEQ ID NO: 21916
  Description of Artificial Sequence: Synthetic polypeptide
  XENP020024 2A11_H0L1_IgG1_PVA_/S267K Light Chain

SEQ ID NO: 22357 - protein, 107 aa, Artificial Sequence; identical to SEQ ID NO: 21917
  Description of Artificial Sequence: Synthetic polypeptide
  VL of XENP020024

SEQ ID NO: 22358 - protein, 11 aa, Artificial Sequence
  Description of Artificial Sequence: Synthetic peptide
  XENP020024 vlCDR1
RASQDIGNYLN

SEQ ID NO: 22359 - protein, 7 aa, Artificial Sequence
  Description of Artificial Sequence: Synthetic peptide
  XENP020024 vlCDR2
YTSRLHS

SEQ ID NO: 22360 - protein, 9 aa, Artificial Sequence
  Description of Artificial Sequence: Synthetic peptide
  XENP020024 vlCDR3
QQGNTLPYT

SEQ ID NO: 22361 - protein, 445 aa, Artificial Sequence; identical to SEQ ID NO: 22131
  Description of Artificial Sequence: Synthetic polypeptide
  XENP020025 7A6_H1L0_IgG1_PVA_/S267K Heavy Chain

SEQ ID NO: 22362 - protein, 116 aa, Artificial Sequence; identical to SEQ ID NO: 22132
  Description of Artificial Sequence: Synthetic polypeptide
  VH of XENP020025

SEQ ID NO: 22363 - protein, 6 aa, Artificial Sequence
  Description of Artificial Sequence: Synthetic peptide
  XENP020025 vhCDR1
SGYFWN

SEQ ID NO: 22364 - protein, 15 aa, Artificial Sequence
  Description of Artificial Sequence: Synthetic peptide
  XENP020025 vhCDR2
YISYDSNYYNPSVKG

SEQ ID NO: 22365 - protein, 8 aa, Artificial Sequence
  Description of Artificial Sequence: Synthetic peptide
  XENP020025 vhCDR3
GGITTFDY

SEQ ID NO: 22366 - protein, 218 aa, Artificial Sequence; identical to SEQ ID NO: 22126
  Description of Artificial Sequence: Synthetic polypeptide
  XENP020025 7A6_H1L0_IgG1_PVA_/S267K Light Chain

SEQ ID NO: 22367 - protein, 111 aa, Artificial Sequence; identical to SEQ ID NO: 22127
  Description of Artificial Sequence: Synthetic polypeptide
  VL of XENP020025

SEQ ID NO: 22368 - protein, 15 aa, Artificial Sequence
  Description of Artificial Sequence: Synthetic peptide
  XENP020025 vlCDR1
KASQSVDYDGDSYMN

SEQ ID NO: 22369 - protein, 7 aa, Artificial Sequence
  Description of Artificial Sequence: Synthetic peptide
  XENP020025 vlCDR2
AASNLES

SEQ ID NO: 22370 - protein, 9 aa, Artificial Sequence
  Description of Artificial Sequence: Synthetic peptide
  XENP020025 vlCDR3
QQSNEDPRT

SEQ ID NO: 22371 - protein, 445 aa, Artificial Sequence; identical to SEQ ID NO: 22121
  Description of Artificial Sequence: Synthetic polypeptide
  XENP020026 7A6_H0L1_IgG1_PVA_/S267K Heavy Chain

SEQ ID NO: 22372 - protein, 116 aa, Artificial Sequence; identical to SEQ ID NO: 22122
  Description of Artificial Sequence: Synthetic polypeptide
  VH of XENP020026

SEQ ID NO: 22373 - protein, 6 aa, Artificial Sequence
  Description of Artificial Sequence: Synthetic peptide
  XENP020026 vhCDR1
SGYFWN

SEQ ID NO: 22374 - protein, 15 aa, Artificial Sequence
  Description of Artificial Sequence: Synthetic peptide
  XENP020026 vhCDR2
YISYDSNYYNPSLKN

SEQ ID NO: 22375 - protein, 8 aa, Artificial Sequence
  Description of Artificial Sequence: Synthetic peptide
  XENP020026 vhCDR3
GGITTFDY

SEQ ID NO: 22376 - protein, 218 aa, Artificial Sequence; identical to SEQ ID NO: 22136
  Description of Artificial Sequence: Synthetic polypeptide
  XENP020026 7A6_H0L1_IgG1_PVA_/S267K Light Chain

SEQ ID NO: 22377 - protein, 111 aa, Artificial Sequence; identical to SEQ ID NO: 22137
  Description of Artificial Sequence: Synthetic polypeptide
  VL of XENP020026

SEQ ID NO: 22378 - protein, 15 aa, Artificial Sequence
  Description of Artificial Sequence: Synthetic peptide
  XENP020026 vlCDR1
RASQSVDYDGDSYMN

SEQ ID NO: 22379 - protein, 7 aa, Artificial Sequence
  Description of Artificial Sequence: Synthetic peptide
  XENP020026 vlCDR2
AASNLES

SEQ ID NO: 22380 - protein, 9 aa, Artificial Sequence
  Description of Artificial Sequence: Synthetic peptide
  XENP020026 vlCDR3
QQSNEDPRT

SEQ ID NO: 22381 - protein, 445 aa, Artificial Sequence; identical to SEQ ID NO: 22121
  Description of Artificial Sequence: Synthetic polypeptide
  XENP020027 7A6_H0L3_IgG1_PVA_/S267K Heavy Chain

SEQ ID NO: 22382 - protein, 116 aa, Artificial Sequence; identical to SEQ ID NO: 22122
  Description of Artificial Sequence: Synthetic polypeptide
  VH of XENP020027

SEQ ID NO: 22383 - protein, 6 aa, Artificial Sequence
  Description of Artificial Sequence: Synthetic peptide
  XENP020027 vhCDR1
SGYFWN

SEQ ID NO: 22384 - protein, 15 aa, Artificial Sequence
  Description of Artificial Sequence: Synthetic peptide
  XENP020027 vhCDR2
YISYDSNYYNPSLKN

SEQ ID NO: 22385 - protein, 8 aa, Artificial Sequence
  Description of Artificial Sequence: Synthetic peptide
  XENP020027 vhCDR3
GGITTFDY

SEQ ID NO: 22386 - protein, 218 aa, Artificial Sequence; identical to SEQ ID NO: 22156
  Description of Artificial Sequence: Synthetic polypeptide
  XENP020027 7A6_H0L3_IgG1_PVA_/S267K Light Chain

SEQ ID NO: 22387 - protein, 111 aa, Artificial Sequence; identical to SEQ ID NO: 22157
  Description of Artificial Sequence: Synthetic polypeptide
  VL of XENP020027

SEQ ID NO: 22388 - protein, 15 aa, Artificial Sequence
  Description of Artificial Sequence: Synthetic peptide
  XENP020027 vlCDR1
KASQSVDYDGDSYMN

SEQ ID NO: 22389 - protein, 7 aa, Artificial Sequence
  Description of Artificial Sequence: Synthetic peptide
  XENP020027 vlCDR2
AASNLES

SEQ ID NO: 22390 - protein, 9 aa, Artificial Sequence
  Description of Artificial Sequence: Synthetic peptide
  XENP020027 vlCDR3
QQSNEDPRT

SEQ ID NO: 22391 - protein, 450 aa, Artificial Sequence; identical to SEQ ID NO: 22271
  Description of Artificial Sequence: Synthetic polypeptide
  XENP020028 7G8_H1L0_IgG1_PVA_/S267K Heavy Chain

SEQ ID NO: 22392 - protein, 121 aa, Artificial Sequence; identical to SEQ ID NO: 22272
  Description of Artificial Sequence: Synthetic polypeptide
  VH of XENP020028

SEQ ID NO: 22393 - protein, 5 aa, Artificial Sequence
  Description of Artificial Sequence: Synthetic peptide
  XENP020028 vhCDR1
DAWMD

SEQ ID NO: 22394 - protein, 19 aa, Artificial Sequence
  Description of Artificial Sequence: Synthetic peptide
  XENP020028 vhCDR2
EIRTKANNHATYYAEKFQG

SEQ ID NO: 22395 - protein, 10 aa, Artificial Sequence
  Description of Artificial Sequence: Synthetic peptide
  XENP020028 vhCDR3
LANWDWYFDV

SEQ ID NO: 22396 - protein, 218 aa, Artificial Sequence; identical to SEQ ID NO: 22266
  Description of Artificial Sequence: Synthetic polypeptide
  XENP020028 7G8_H1L0_IgG1_PVA_/S267K Light Chain

SEQ ID NO: 22397 - protein, 111 aa, Artificial Sequence; identical to SEQ ID NO: 22267
  Description of Artificial Sequence: Synthetic polypeptide
  VL of XENP020028

SEQ ID NO: 22398 - protein, 15 aa, Artificial Sequence
  Description of Artificial Sequence: Synthetic peptide
  XENP020028 vlCDR1
KASQSVDYDGDSYMN

SEQ ID NO: 22399 - protein, 7 aa, Artificial Sequence
  Description of Artificial Sequence: Synthetic peptide
  XENP020028 vlCDR2
AASNLES

SEQ ID NO: 22400 - protein, 9 aa, Artificial Sequence
  Description of Artificial Sequence: Synthetic peptide
  XENP020028 vlCDR3
QQSNEDPFT

SEQ ID NO: 22401 - protein, 450 aa, Artificial Sequence; identical to SEQ ID NO: 22261
  Description of Artificial Sequence: Synthetic polypeptide
  XENP020029 7G8_H0L1_IgG1_PVA_/S267K Heavy Chain

SEQ ID NO: 22402 - protein, 121 aa, Artificial Sequence; identical to SEQ ID NO: 22262
  Description of Artificial Sequence: Synthetic polypeptide
  VH of XENP020029

SEQ ID NO: 22403 - protein, 5 aa, Artificial Sequence
  Description of Artificial Sequence: Synthetic peptide
  XENP020029 vhCDR1
DAWMD

SEQ ID NO: 22404 - protein, 19 aa, Artificial Sequence
  Description of Artificial Sequence: Synthetic peptide
  XENP020029 vhCDR2
EIRTKANNHATYYAESVKG

SEQ ID NO: 22405 - protein, 10 aa, Artificial Sequence
  Description of Artificial Sequence: Synthetic peptide
  XENP020029 vhCDR3
LANWDWYFDV

SEQ ID NO: 22406 - protein, 218 aa, Artificial Sequence; identical to SEQ ID NO: 22276
  Description of Artificial Sequence: Synthetic polypeptide
  XENP020029 7G8_H0L1_IgG1_PVA_/S267K Light Chain

SEQ ID NO: 22407 - protein, 111 aa, Artificial Sequence; identical to SEQ ID NO: 22277
  Description of Artificial Sequence: Synthetic polypeptide
  VL of XENP020029

SEQ ID NO: 22408 - protein, 15 aa, Artificial Sequence
  Description of Artificial Sequence: Synthetic peptide
  XENP020029 vlCDR1
RASQSVDYDGDSYMN

SEQ ID NO: 22409 - protein, 7 aa, Artificial Sequence
  Description of Artificial Sequence: Synthetic peptide
  XENP020029 vlCDR2
AASNLES

SEQ ID NO: 22410 - protein, 9 aa, Artificial Sequence
  Description of Artificial Sequence: Synthetic peptide
  XENP020029 vlCDR3
QQSNEDPFT

SEQ ID NO: 22411 - protein, 450 aa, Artificial Sequence; identical to SEQ ID NO: 22301
  Description of Artificial Sequence: Synthetic polypeptide
  XENP020262 7G8_H2L0_IgG1_PVA_/S267K Heavy Chain

SEQ ID NO: 22412 - protein, 121 aa, Artificial Sequence; identical to SEQ ID NO: 22302
  Description of Artificial Sequence: Synthetic polypeptide
  VH of XENP020262

SEQ ID NO: 22413 - protein, 5 aa, Artificial Sequence
  Description of Artificial Sequence: Synthetic peptide
  XENP020262 vhCDR1
DAWMD

SEQ ID NO: 22414 - protein, 19 aa, Artificial Sequence
  Description of Artificial Sequence: Synthetic peptide
  XENP020262 vhCDR2
EIRTKANNHATYYAESVKG

SEQ ID NO: 22415 - protein, 10 aa, Artificial Sequence
  Description of Artificial Sequence: Synthetic peptide
  XENP020262 vhCDR3
LANWDWYFDV

SEQ ID NO: 22416 - protein, 218 aa, Artificial Sequence; identical to SEQ ID NO: 22266
  Description of Artificial Sequence: Synthetic polypeptide
  XENP020262 7G8_H2L0_IgG1_PVA_/S267K Light Chain

SEQ ID NO: 22417 - protein, 111 aa, Artificial Sequence; identical to SEQ ID NO: 22267
  Description of Artificial Sequence: Synthetic polypeptide
  VL of XENP020262

SEQ ID NO: 22418 - protein, 15 aa, Artificial Sequence
  Description of Artificial Sequence: Synthetic peptide
  XENP020262 vlCDR1
KASQSVDYDGDSYMN

SEQ ID NO: 22419 - protein, 7 aa, Artificial Sequence
  Description of Artificial Sequence: Synthetic peptide
  XENP020262 vlCDR2
AASNLES

SEQ ID NO: 22420 - protein, 9 aa, Artificial Sequence
  Description of Artificial Sequence: Synthetic peptide
  XENP020262 vlCDR3
QQSNEDPFT

SEQ ID NO: 22421 - protein, 450 aa, Artificial Sequence; identical to SEQ ID NO: 22261
  Description of Artificial Sequence: Synthetic polypeptide
  XENP020263 7G8_H0L2_IgG1_PVA_/S267K Heavy Chain

SEQ ID NO: 22422 - protein, 121 aa, Artificial Sequence; identical to SEQ ID NO: 22262
  Description of Artificial Sequence: Synthetic polypeptide
  VH of XENP020263

SEQ ID NO: 22423 - protein, 5 aa, Artificial Sequence
  Description of Artificial Sequence: Synthetic peptide
  XENP020263 vhCDR1
DAWMD

SEQ ID NO: 22424 - protein, 19 aa, Artificial Sequence
  Description of Artificial Sequence: Synthetic peptide
  XENP020263 vhCDR2
EIRTKANNHATYYAESVKG

SEQ ID NO: 22425 - protein, 10 aa, Artificial Sequence
  Description of Artificial Sequence: Synthetic peptide
  XENP020263 vhCDR3
LANWDWYFDV

SEQ ID NO: 22426 - protein, 218 aa, Artificial Sequence; identical to SEQ ID NO: 22286
  Description of Artificial Sequence: Synthetic polypeptide
  XENP020263 7G8_H0L2_IgG1_PVA_/S267K Light Chain

SEQ ID NO: 22427 - protein, 111 aa, Artificial Sequence; identical to SEQ ID NO: 22287
  Description of Artificial Sequence: Synthetic polypeptide
  VL of XENP020263

SEQ ID NO: 22428 - protein, 15 aa, Artificial Sequence
  Description of Artificial Sequence: Synthetic peptide
  XENP020263 vlCDR1
RASQSVDYDGDSYMN

SEQ ID NO: 22429 - protein, 7 aa, Artificial Sequence
  Description of Artificial Sequence: Synthetic peptide
  XENP020263 vlCDR2
AASNLES

SEQ ID NO: 22430 - protein, 9 aa, Artificial Sequence
  Description of Artificial Sequence: Synthetic peptide
  XENP020263 vlCDR3
QQSNEDPFT

SEQ ID NO: 22431 - protein, 444 aa, Artificial Sequence
  Description of Artificial Sequence: Synthetic polypeptide
  XENP020412 8D7_H0L0_IgG1_PVA_/S267K Heavy Chain
QVQLKQSGPGLVQPSQSLSITCTVSGFSLSSYGVHWVRQSPGKGLEWLGVIWSGSTDYNAAFISRLSISKDNSKSQVFFKMNSLQPNDTAIYYCARTYYYAMDYWGQGTSVTVSSASTKGPSVFPLAPSSKSTSGGTAALGCLVKDYFPEPVTVSWNSGALTSGVHTFPAVLQSSGLYSLSSVVTVPSSSLGTQTYICNVNHKPSNTKVDKKVEPKSCDKTHTCPPCPAPPVAGPSVFLFPPKPKDTLMISRTPEVTCVVVDVKHEDPEVKFNWYVDGVEVHNAKTKPREEQYNSTYRVVSVLTVLHQDWLNGKEYKCKVSNKALPAPIEKTISKAKGQPREPQVYTLPPSREEMTKNQVSLTCLVKGFYPSDIAVEWESNGQPENNYKTTPPVLDSDGSFFLYSKLTVDKSRWQQGNVFSCSVMHEALHNHYTQKSLSLSPGK

SEQ ID NO: 22432 - protein, 115 aa, Artificial Sequence
  Description of Artificial Sequence: Synthetic polypeptide
  VH of XENP020412
QVQLKQSGPGLVQPSQSLSITCTVSGFSLSSYGVHWVRQSPGKGLEWLGVIWSGSTDYNAAFISRLSISKDNSKSQVFFKMNSLQPNDTAIYYCARTYYYAMDYWGQGTSVTVSS

SEQ ID NO: 22433 - protein, 5 aa, Artificial Sequence
  Description of Artificial Sequence: Synthetic peptide
  XENP020412 vhCDR1
SYGVH

SEQ ID NO: 22434 - protein, 15 aa, Artificial Sequence
  Description of Artificial Sequence: Synthetic peptide
  XENP020412 vhCDR2
VIWSGSTDYNAAFIS

SEQ ID NO: 22435 - protein, 8 aa, Artificial Sequence
  Description of Artificial Sequence: Synthetic peptide
  XENP020412 vhCDR3
TYYYAMDY

SEQ ID NO: 22436 - protein, 214 aa, Artificial Sequence
  Description of Artificial Sequence: Synthetic polypeptide
  XENP020412 8D7_H0L0_IgG1_PVA_/S267K Light Chain
DIQMTQSPASLSVSVGETVTITCRASENIYSNLAWYQQKQGKSPQFLIYAATNLADGVPSRFSGSGSGTQYSLKINSLQSEDFGSYYCQHFWGTPWTFGGGTKLEIKRTVAAPSVFIFPPSDEQLKSGTASVVCLLNNFYPREAKVQWKVDNALQSGNSQESVTEQDSKDSTYSLSSTLTLSKADYEKHKVYACEVTHQGLSSPVTKSFNRGEC

SEQ ID NO: 22437 - protein, 107 aa, Artificial Sequence
  Description of Artificial Sequence: Synthetic polypeptide
  VL of XENP020412
DIQMTQSPASLSVSVGETVTITCRASENIYSNLAWYQQKQGKSPQFLIYAATNLADGVPSRFSGSGSGTQYSLKINSLQSEDFGSYYCQHFWGTPWTFGGGTKLEIK

SEQ ID NO: 22438 - protein, 11 aa, Artificial Sequence
  Description of Artificial Sequence: Synthetic peptide
  XENP020412 vlCDR1
RASENIYSNLA

SEQ ID NO: 22439 - protein, 7 aa, Artificial Sequence
  Description of Artificial Sequence: Synthetic peptide
  XENP020412 vlCDR2
AATNLAD

SEQ ID NO: 22440 - protein, 9 aa, Artificial Sequence
  Description of Artificial Sequence: Synthetic peptide
  XENP020412 vlCDR3
QHFWGTPWT

SEQ ID NO: 22441 - protein, 444 aa, Artificial Sequence
  Description of Artificial Sequence: Synthetic polypeptide
  XENP020413 8D7_H2L1_IgG1_PVA_/S267K Heavy Chain
QVQLVQSGAEVKKPGASVKVSCKVSGFSLSSYGVHWVRQAPGQGLEWLGVIWSGSTDYNAKFQGRVTITKDNSKSTVYFELSSLRSEDTAVYYCARTYYYAMDYWGQGTLVTVSSASTKGPSVFPLAPSSKSTSGGTAALGCLVKDYFPEPVTVSWNSGALTSGVHTFPAVLQSSGLYSLSSVVTVPSSSLGTQTYICNVNHKPSNTKVDKKVEPKSCDKTHTCPPCPAPPVAGPSVFLFPPKPKDTLMISRTPEVTCVVVDVKHEDPEVKFNWYVDGVEVHNAKTKPREEQYNSTYRVVSVLTVLHQDWLNGKEYKCKVSNKALPAPIEKTISKAKGQPREPQVYTLPPSREEMTKNQVSLTCLVKGFYPSDIAVEWESNGQPENNYKTTPPVLDSDGSFFLYSKLTVDKSRWQQGNVFSCSVMHEALHNHYTQKSLSLSPGK

SEQ ID NO: 22442 - protein, 115 aa, Artificial Sequence
  Description of Artificial Sequence: Synthetic polypeptide
  VH of XENP020413
QVQLVQSGAEVKKPGASVKVSCKVSGFSLSSYGVHWVRQAPGQGLEWLGVIWSGSTDYNAKFQGRVTITKDNSKSTVYFELSSLRSEDTAVYYCARTYYYAMDYWGQGTLVTVSS

SEQ ID NO: 22443 - protein, 5 aa, Artificial Sequence
  Description of Artificial Sequence: Synthetic peptide
  XENP020413 vhCDR1
SYGVH

SEQ ID NO: 22444 - protein, 15 aa, Artificial Sequence
  Description of Artificial Sequence: Synthetic peptide
  XENP020413 vhCDR2
VIWSGSTDYNAKFQG

SEQ ID NO: 22445 - protein, 8 aa, Artificial Sequence
  Description of Artificial Sequence: Synthetic peptide
  XENP020413 vhCDR3
TYYYAMDY

SEQ ID NO: 22446 - protein, 214 aa, Artificial Sequence; identical to SEQ ID NO: 21896
  Description of Artificial Sequence: Synthetic polypeptide
  XENP020413 8D7_H2L1_IgG1_PVA_/S267K Light Chain

SEQ ID NO: 22447 - protein, 107 aa, Artificial Sequence; identical to SEQ ID NO: 21897
  Description of Artificial Sequence: Synthetic polypeptide
  VL of XENP020413

SEQ ID NO: 22448 - protein, 11 aa, Artificial Sequence
  Description of Artificial Sequence: Synthetic peptide
  XENP020413 vlCDR1
RASENIYSNLA

SEQ ID NO: 22449 - protein, 7 aa, Artificial Sequence
  Description of Artificial Sequence: Synthetic peptide
  XENP020413 vlCDR2
AATNLAD

SEQ ID NO: 22450 - protein, 9 aa, Artificial Sequence
  Description of Artificial Sequence: Synthetic peptide
  XENP020413 vlCDR3
QHFWGTPWT

SEQ ID NO: 22451 - protein, 444 aa, Artificial Sequence
  Description of Artificial Sequence: Synthetic polypeptide
  XENP020414 8D7_H3L1_IgG1_PVA_/S267K Heavy Chain
QVQLVESGGGVVQPGRSLRLSCAVSGFSLSSYGVHWVRQAPGKGLEWVAVIWSGSTDYNAAVKGRFTISKDNSKSTVYLQMNSLRAEDTAVYYCARTYYYAMDYWGQGTLVTVSSASTKGPSVFPLAPSSKSTSGGTAALGCLVKDYFPEPVTVSWNSGALTSGVHTFPAVLQSSGLYSLSSVVTVPSSSLGTQTYICNVNHKPSNTKVDKKVEPKSCDKTHTCPPCPAPPVAGPSVFLFPPKPKDTLMISRTPEVTCVVVDVKHEDPEVKFNWYVDGVEVHNAKTKPREEQYNSTYRVVSVLTVLHQDWLNGKEYKCKVSNKALPAPIEKTISKAKGQPREPQVYTLPPSREEMTKNQVSLTCLVKGFYPSDIAVEWESNGQPENNYKTTPPVLDSDGSFFLYSKLTVDKSRWQQGNVFSCSVMHEALHNHYTQKSLSLSPGK

SEQ ID NO: 22452 - protein, 115 aa, Artificial Sequence
  Description of Artificial Sequence: Synthetic polypeptide
  VH of XENP020414
QVQLVESGGGVVQPGRSLRLSCAVSGFSLSSYGVHWVRQAPGKGLEWVAVIWSGSTDYNAAVKGRFTISKDNSKSTVYLQMNSLRAEDTAVYYCARTYYYAMDYWGQGTLVTVSS

SEQ ID NO: 22453 - protein, 5 aa, Artificial Sequence
  Description of Artificial Sequence: Synthetic peptide
  XENP020414 vhCDR1
SYGVH

SEQ ID NO: 22454 - protein, 15 aa, Artificial Sequence
  Description of Artificial Sequence: Synthetic peptide
  XENP020414 vhCDR2
VIWSGSTDYNAAVKG

SEQ ID NO: 22455 - protein, 8 aa, Artificial Sequence
  Description of Artificial Sequence: Synthetic peptide
  XENP020414 vhCDR3
TYYYAMDY

SEQ ID NO: 22456 - protein, 214 aa, Artificial Sequence; identical to SEQ ID NO: 21896
  Description of Artificial Sequence: Synthetic polypeptide
  XENP020414 8D7_H3L1_IgG1_PVA_/S267K Light Chain

SEQ ID NO: 22457 - protein, 107 aa, Artificial Sequence; identical to SEQ ID NO: 21897
  Description of Artificial Sequence: Synthetic polypeptide
  VL of XENP020414

SEQ ID NO: 22458 - protein, 11 aa, Artificial Sequence
  Description of Artificial Sequence: Synthetic peptide
  XENP020414 vlCDR1
RASENIYSNLA

SEQ ID NO: 22459 - protein, 7 aa, Artificial Sequence
  Description of Artificial Sequence: Synthetic peptide
  XENP020414 vlCDR2
AATNLAD

SEQ ID NO: 22460 - protein, 9 aa, Artificial Sequence
  Description of Artificial Sequence: Synthetic peptide
  XENP020414 vlCDR3
QHFWGTPWT

SEQ ID NO: 22461 - protein, 449 aa, Artificial Sequence
  Description of Artificial Sequence: Synthetic polypeptide
  XENP020415 4C8_H0L0_IgG1_PVA_/S267K Heavy Chain
EVQLQQSGPELVKPGASVKISCKASGYTFTDYNVHWVKQSHGKSLEWIGYIYPYTGGTGYNQKFKSKATLTVDNSSSTAYMELRSLTSEDSAVYYCARSDDGYSYAMDYWGQGTSVTVSSASTKGPSVFPLAPSSKSTSGGTAALGCLVKDYFPEPVTVSWNSGALTSGVHTFPAVLQSSGLYSLSSVVTVPSSSLGTQTYICNVNHKPSNTKVDKKVEPKSCDKTHTCPPCPAPPVAGPSVFLFPPKPKDTLMISRTPEVTCVVVDVKHEDPEVKFNWYVDGVEVHNAKTKPREEQYNSTYRVVSVLTVLHQDWLNGKEYKCKVSNKALPAPIEKTISKAKGQPREPQVYTLPPSREEMTKNQVSLTCLVKGFYPSDIAVEWESNGQPENNYKTTPPVLDSDGSFFLYSKLTVDKSRWQQGNVFSCSVMHEALHNHYTQKSLSLSPGK

SEQ ID NO: 22462 - protein, 120 aa, Artificial Sequence
  Description of Artificial Sequence: Synthetic polypeptide
  VH of XENP020415
EVQLQQSGPELVKPGASVKISCKASGYTFTDYNVHWVKQSHGKSLEWIGYIYPYTGGTGYNQKFKSKATLTVDNSSSTAYMELRSLTSEDSAVYYCARSDDGYSYAMDYWGQGTSVTVSS

SEQ ID NO: 22463 - protein, 5 aa, Artificial Sequence
  Description of Artificial Sequence: Synthetic peptide
  XENP020415 vhCDR1
DYNVH

SEQ ID NO: 22464 - protein, 17 aa, Artificial Sequence
  Description of Artificial Sequence: Synthetic peptide
  XENP020415 vhCDR2
YIYPYTGGTGYNQKFKS

SEQ ID NO: 22465 - protein, 11 aa, Artificial Sequence
  Description of Artificial Sequence: Synthetic peptide
  XENP020415 vhCDR3
SDDGYSYAMDY

SEQ ID NO: 22466 - protein, 213 aa, Artificial Sequence
  Description of Artificial Sequence: Synthetic polypeptide
  XENP020415 4C8_H0L0_IgG1_PVA_/S267K Light Chain
DIQMTQTTSSLSASLGDRVTISCRASQDISNYLNWYQQKPDGTVKLLIYYTSRLHSGVPSRFSGSGSGTDYSLTISNLEQEDIATYFCQQGNTLWTFGGGTKLEIKRTVAAPSVFIFPPSDEQLKSGTASVVCLLNNFYPREAKVQWKVDNALQSGNSQESVTEQDSKDSTYSLSSTLTLSKADYEKHKVYACEVTHQGLSSPVTKSFNRGEC

SEQ ID NO: 22467 - protein, 106 aa, Artificial Sequence
  Description of Artificial Sequence: Synthetic polypeptide
  VL of XENP020415
DIQMTQTTSSLSASLGDRVTISCRASQDISNYLNWYQQKPDGTVKLLIYYTSRLHSGVPSRFSGSGSGTDYSLTISNLEQEDIATYFCQQGNTLWTFGGGTKLEIK

SEQ ID NO: 22468 - protein, 11 aa, Artificial Sequence
  Description of Artificial Sequence: Synthetic peptide
  XENP020415 vlCDR1
RASQDISNYLN

SEQ ID NO: 22469 - protein, 7 aa, Artificial Sequence
  Description of Artificial Sequence: Synthetic peptide
  XENP020415 vlCDR2
YTSRLHS

SEQ ID NO: 22470 - protein, 8 aa, Artificial Sequence
  Description of Artificial Sequence: Synthetic peptide
  XENP020415 vlCDR3
QQGNTLWT

SEQ ID NO: 22471 - protein, 449 aa, Artificial Sequence
  Description of Artificial Sequence: Synthetic polypeptide
  XENP020416 4C8_H2L1_IgG1_PVA_/S267K Heavy Chain
QVQLVQSGAEVKKPGASVKVSCKASGYTFTDYNVHWVRQAPGQGLEWIGYIYPYTGGTGYNQKFQGRVTLTVDNSISTAYMELSSLRSEDTAVYYCARSDDGYSYAMDYWGQGTLVTVSSASTKGPSVFPLAPSSKSTSGGTAALGCLVKDYFPEPVTVSWNSGALTSGVHTFPAVLQSSGLYSLSSVVTVPSSSLGTQTYICNVNHKPSNTKVDKKVEPKSCDKTHTCPPCPAPPVAGPSVFLFPPKPKDTLMISRTPEVTCVVVDVKHEDPEVKFNWYVDGVEVHNAKTKPREEQYNSTYRVVSVLTVLHQDWLNGKEYKCKVSNKALPAPIEKTISKAKGQPREPQVYTLPPSREEMTKNQVSLTCLVKGFYPSDIAVEWESNGQPENNYKTTPPVLDSDGSFFLYSKLTVDKSRWQQGNVFSCSVMHEALHNHYTQKSLSLSPGK

SEQ ID NO: 22472 - protein, 120 aa, Artificial Sequence
  Description of Artificial Sequence: Synthetic polypeptide
  VH of XENP020416
QVQLVQSGAEVKKPGASVKVSCKASGYTFTDYNVHWVRQAPGQGLEWIGYIYPYTGGTGYNQKFQGRVTLTVDNSISTAYMELSSLRSEDTAVYYCARSDDGYSYAMDYWGQGTLVTVSS

SEQ ID NO: 22473 - protein, 5 aa, Artificial Sequence
  Description of Artificial Sequence: Synthetic peptide
  XENP020416 vhCDR1
DYNVH

SEQ ID NO: 22474 - protein, 17 aa, Artificial Sequence
  Description of Artificial Sequence: Synthetic peptide
  XENP020416 vhCDR2
YIYPYTGGTGYNQKFQG

SEQ ID NO: 22475 - protein, 11 aa, Artificial Sequence
  Description of Artificial Sequence: Synthetic peptide
  XENP020416 vhCDR3
SDDGYSYAMDY

SEQ ID NO: 22476 - protein, 213 aa, Artificial Sequence; identical to SEQ ID NO: 22116
  Description of Artificial Sequence: Synthetic polypeptide
  XENP020416 4C8_H2L1_IgG1_PVA_/S267K Light Chain

SEQ ID NO: 22477 - protein, 106 aa, Artificial Sequence; identical to SEQ ID NO: 22117
  Description of Artificial Sequence: Synthetic polypeptide
  VL of XENP020416

SEQ ID NO: 22478 - protein, 11 aa, Artificial Sequence
  Description of Artificial Sequence: Synthetic peptide
  XENP020416 vlCDR1
QASQDISNYLN

SEQ ID NO: 22479 - protein, 7 aa, Artificial Sequence
  Description of Artificial Sequence: Synthetic peptide
  XENP020416 vlCDR2
YTSRLHS

SEQ ID NO: 22480 - protein, 8 aa, Artificial Sequence
  Description of Artificial Sequence: Synthetic peptide
  XENP020416 vlCDR3
QQGNTLWT

SEQ ID NO: 22481 - protein, 450 aa, Artificial Sequence
  Description of Artificial Sequence: Synthetic polypeptide
  XENP020417 7G8_H3L1_IgG1_PVA_/S267K Heavy Chain
EVQLVESGGGLVQPGGSLRLSCAASGFTFSDAWMDWVRQAPGKGLEWVAEIRTKANNHATYYAESVKGRFTISRDDSKSSVYLQMNSLRAEDTAVYYCTRLANWDWYFDVWGQGTTVTVSSASTKGPSVFPLAPSSKSTSGGTAALGCLVKDYFPEPVTVSWNSGALTSGVHTFPAVLQSSGLYSLSSVVTVPSSSLGTQTYICNVNHKPSNTKVDKKVEPKSCDKTHTCPPCPAPPVAGPSVFLFPPKPKDTLMISRTPEVTCVVVDVKHEDPEVKFNWYVDGVEVHNAKTKPREEQYNSTYRVVSVLTVLHQDWLNGKEYKCKVSNKALPAPIEKTISKAKGQPREPQVYTLPPSREEMTKNQVSLTCLVKGFYPSDIAVEWESNGQPENNYKTTPPVLDSDGSFFLYSKLTVDKSRWQQGNVFSCSVMHEALHNHYTQKSLSLSPGK

SEQ ID NO: 22482 - protein, 121 aa, Artificial Sequence
  Description of Artificial Sequence: Synthetic polypeptide
  VH of XENP020417
EVQLVESGGGLVQPGGSLRLSCAASGFTFSDAWMDWVRQAPGKGLEWVAEIRTKANNHATYYAESVKGRFTISRDDSKSSVYLQMNSLRAEDTAVYYCTRLANWDWYFDVWGQGTTVTVSS

SEQ ID NO: 22483 - protein, 5 aa, Artificial Sequence
  Description of Artificial Sequence: Synthetic peptide
  XENP020417 vhCDR1
DAWMD

SEQ ID NO: 22484 - protein, 19 aa, Artificial Sequence
  Description of Artificial Sequence: Synthetic peptide
  XENP020417 vhCDR2
EIRTKANNHATYYAESVKG

SEQ ID NO: 22485 - protein, 10 aa, Artificial Sequence
  Description of Artificial Sequence: Synthetic peptide
  XENP020417 vhCDR3
LANWDWYFDV

SEQ ID NO: 22486 - protein, 218 aa, Artificial Sequence; identical to SEQ ID NO: 22276
  Description of Artificial Sequence: Synthetic polypeptide
  XENP020417 7G8_H3L1_IgG1_PVA_/S267K Light Chain

SEQ ID NO: 22487 - protein, 111 aa, Artificial Sequence; identical to SEQ ID NO: 22277
  Description of Artificial Sequence: Synthetic polypeptide
  VL of XENP020417

SEQ ID NO: 22488 - protein, 15 aa, Artificial Sequence
  Description of Artificial Sequence: Synthetic peptide
  XENP020417 vlCDR1
RASQSVDYDGDSYMN

SEQ ID NO: 22489 - protein, 7 aa, Artificial Sequence
  Description of Artificial Sequence: Synthetic peptide
  XENP020417 vlCDR2
AASNLES

SEQ ID NO: 22490 - protein, 9 aa, Artificial Sequence
  Description of Artificial Sequence: Synthetic peptide
  XENP020417 vlCDR3
QQSNEDPFT

SEQ ID NO: 22491 - protein, 450 aa, Artificial Sequence; identical to SEQ ID NO: 22481
  Description of Artificial Sequence: Synthetic polypeptide
  XENP020418 7G8_H3L2_IgG1_PVA_/S267K Heavy Chain

SEQ ID NO: 22492 - protein, 121 aa, Artificial Sequence; identical to SEQ ID NO: 22482
  Description of Artificial Sequence: Synthetic polypeptide
  VH of XENP020418

SEQ ID NO: 22493 - protein, 5 aa, Artificial Sequence
  Description of Artificial Sequence: Synthetic peptide
  XENP020418 vhCDR1
DAWMD

SEQ ID NO: 22494 - protein, 19 aa, Artificial Sequence
  Description of Artificial Sequence: Synthetic peptide
  XENP020418 vhCDR2
EIRTKANNHATYYAESVKG

SEQ ID NO: 22495 - protein, 10 aa, Artificial Sequence
  Description of Artificial Sequence: Synthetic peptide
  XENP020418 vhCDR3
LANWDWYFDV

SEQ ID NO: 22496 - protein, 218 aa, Artificial Sequence; identical to SEQ ID NO: 22286
  Description of Artificial Sequence: Synthetic polypeptide
  XENP020418 7G8_H3L2_IgG1_PVA_/S267K Light Chain

SEQ ID NO: 22497 - protein, 111 aa, Artificial Sequence; identical to SEQ ID NO: 22287
  Description of Artificial Sequence: Synthetic polypeptide
  VL of XENP020418

SEQ ID NO: 22498 - protein, 15 aa, Artificial Sequence
  Description of Artificial Sequence: Synthetic peptide
  XENP020418 vlCDR1
RASQSVDYDGDSYMN

SEQ ID NO: 22499 - protein, 7 aa, Artificial Sequence
  Description of Artificial Sequence: Synthetic peptide
  XENP020418 vlCDR2
AASNLES

SEQ ID NO: 22500 - protein, 9 aa, Artificial Sequence
  Description of Artificial Sequence: Synthetic peptide
  XENP020418 vlCDR3
QQSNEDPFT

SEQ ID NO: 22501 - protein, 450 aa, Artificial Sequence; identical to SEQ ID NO: 22481
  Description of Artificial Sequence: Synthetic polypeptide
  XENP020419 7G8_H3L3_IgG1_PVA_/S267K Heavy Chain

SEQ ID NO: 22502 - protein, 121 aa, Artificial Sequence; identical to SEQ ID NO: 22482
  Description of Artificial Sequence: Synthetic polypeptide
  VH of XENP020419

SEQ ID NO: 22503 - protein, 5 aa, Artificial Sequence
  Description of Artificial Sequence: Synthetic peptide
  XENP020419 vhCDR1
DAWMD

SEQ ID NO: 22504 - protein, 19 aa, Artificial Sequence
  Description of Artificial Sequence: Synthetic peptide
  XENP020419 vhCDR2
EIRTKANNHATYYAESVKG

SEQ ID NO: 22505 - protein, 10 aa, Artificial Sequence
  Description of Artificial Sequence: Synthetic peptide
  XENP020419 vhCDR3
LANWDWYFDV

SEQ ID NO: 22506 - protein, 218 aa, Artificial Sequence; identical to SEQ ID NO: 22296
  Description of Artificial Sequence: Synthetic polypeptide
  XENP020419 7G8_H3L3_IgG1_PVA_/S267K Light Chain

SEQ ID NO: 22507 - protein, 111 aa, Artificial Sequence; identical to SEQ ID NO: 22297
  Description of Artificial Sequence: Synthetic polypeptide
  VL of XENP020419

SEQ ID NO: 22508 - protein, 15 aa, Artificial Sequence
  Description of Artificial Sequence: Synthetic peptide
  XENP020419 vlCDR1
KASQSVDYDGDSYMN

SEQ ID NO: 22509 - protein, 7 aa, Artificial Sequence
  Description of Artificial Sequence: Synthetic peptide
  XENP020419 vlCDR2
AASNLES

SEQ ID NO: 22510 - protein, 9 aa, Artificial Sequence
  Description of Artificial Sequence: Synthetic peptide
  XENP020419 vlCDR3
QQSNEDPFT

SEQ ID NO: 22511 - protein, 444 aa, Artificial Sequence; identical to SEQ ID NO: 22431
  Description of Artificial Sequence: Synthetic polypeptide
  XENP020412 8D7_H0L0_IgG1_PVA_/S267K Heavy Chain

SEQ ID NO: 22512 - protein, 115 aa, Artificial Sequence; identical to SEQ ID NO: 22432
  Description of Artificial Sequence: Synthetic polypeptide
  VH of XENP020412

SEQ ID NO: 22513 - protein, 5 aa, Artificial Sequence
  Description of Artificial Sequence: Synthetic peptide
  XENP020412 vhCDR1
SYGVH

SEQ ID NO: 22514 - protein, 15 aa, Artificial Sequence
  Description of Artificial Sequence: Synthetic peptide
  XENP020412 vhCDR2
VIWSGSTDYNAAFIS

SEQ ID NO: 22515 - protein, 8 aa, Artificial Sequence
  Description of Artificial Sequence: Synthetic peptide
  XENP020412 vhCDR3
TYYYAMDY

SEQ ID NO: 22516 - protein, 214 aa, Artificial Sequence; identical to SEQ ID NO: 22436
  Description of Artificial Sequence: Synthetic polypeptide
  XENP020412 8D7_H0L0_IgG1_PVA_/S267K Light Chain

SEQ ID NO: 22517 - protein, 107 aa, Artificial Sequence; identical to SEQ ID NO: 22437
  Description of Artificial Sequence: Synthetic polypeptide
  VL of XENP020412

SEQ ID NO: 22518 - protein, 11 aa, Artificial Sequence
  Description of Artificial Sequence: Synthetic peptide
  XENP020412 vlCDR1
RASENIYSNLA

SEQ ID NO: 22519 - protein, 7 aa, Artificial Sequence
  Description of Artificial Sequence: Synthetic peptide
  XENP020412 vlCDR2
AATNLAD

SEQ ID NO: 22520 - protein, 9 aa, Artificial Sequence
  Description of Artificial Sequence: Synthetic peptide
  XENP020412 vlCDR3
QHFWGTPWT

SEQ ID NO: 22521 - protein, 444 aa, Artificial Sequence; identical to SEQ ID NO: 22441
  Description of Artificial Sequence: Synthetic polypeptide
  XENP020413 8D7_H2L1_IgG1_PVA_/S267K Heavy Chain

SEQ ID NO: 22522 - protein, 115 aa, Artificial Sequence; identical to SEQ ID NO: 22442
  Description of Artificial Sequence: Synthetic polypeptide
  VH of XENP020413

SEQ ID NO: 22523 - protein, 5 aa, Artificial Sequence
  Description of Artificial Sequence: Synthetic peptide
  XENP020413 vhCDR1
SYGVH

SEQ ID NO: 22524 - protein, 15 aa, Artificial Sequence
  Description of Artificial Sequence: Synthetic peptide
  XENP020413 vhCDR2
VIWSGSTDYNAKFQG

SEQ ID NO: 22525 - protein, 8 aa, Artificial Sequence
  Description of Artificial Sequence: Synthetic peptide
  XENP020413 vhCDR3
TYYYAMDY

SEQ ID NO: 22526 - protein, 214 aa, Artificial Sequence; identical to SEQ ID NO: 21896
  Description of Artificial Sequence: Synthetic polypeptide
  XENP020413 8D7_H2L1_IgG1_PVA_/S267K Light Chain

SEQ ID NO: 22527 - protein, 107 aa, Artificial Sequence; identical to SEQ ID NO: 21897
  Description of Artificial Sequence: Synthetic polypeptide
  VL of XENP020413

SEQ ID NO: 22528 - protein, 11 aa, Artificial Sequence
  Description of Artificial Sequence: Synthetic peptide
  XENP020413 vlCDR1
RASENIYSNLA

SEQ ID NO: 22529 - protein, 7 aa, Artificial Sequence
  Description of Artificial Sequence: Synthetic peptide
  XENP020413 vlCDR2
AATNLAD

SEQ ID NO: 22530 - protein, 9 aa, Artificial Sequence
  Description of Artificial Sequence: Synthetic peptide
  XENP020413 vlCDR3
QHFWGTPWT

SEQ ID NO: 22531 - protein, 444 aa, Artificial Sequence; identical to SEQ ID NO: 22451
  Description of Artificial Sequence: Synthetic polypeptide
  XENP020414 8D7_H3L1_IgG1_PVA_/S267K Heavy Chain

SEQ ID NO: 22532 - protein, 115 aa, Artificial Sequence; identical to SEQ ID NO: 22452
  Description of Artificial Sequence: Synthetic polypeptide
  VH of XENP020414

SEQ ID NO: 22533 - protein, 5 aa, Artificial Sequence
  Description of Artificial Sequence: Synthetic peptide
  XENP020414 vhCDR1
SYGVH

SEQ ID NO: 22534 - protein, 15 aa, Artificial Sequence
  Description of Artificial Sequence: Synthetic peptide
  XENP020414 vhCDR2
VIWSGSTDYNAAVKG

SEQ ID NO: 22535 - protein, 8 aa, Artificial Sequence
  Description of Artificial Sequence: Synthetic peptide
  XENP020414 vhCDR3
TYYYAMDY

SEQ ID NO: 22536 - protein, 214 aa, Artificial Sequence; identical to SEQ ID NO: 21896
  Description of Artificial Sequence: Synthetic polypeptide
  XENP020414 8D7_H3L1_IgG1_PVA_/S267K Light Chain

SEQ ID NO: 22537 - protein, 107 aa, Artificial Sequence; identical to SEQ ID NO: 21897
  Description of Artificial Sequence: Synthetic polypeptide
  VL of XENP020414

SEQ ID NO: 22538 - protein, 11 aa, Artificial Sequence
  Description of Artificial Sequence: Synthetic peptide
  XENP020414 vlCDR1
RASENIYSNLA

SEQ ID NO: 22539 - protein, 7 aa, Artificial Sequence
  Description of Artificial Sequence: Synthetic peptide
  XENP020414 vlCDR2
AATNLAD

SEQ ID NO: 22540 - protein, 9 aa, Artificial Sequence
  Description of Artificial Sequence: Synthetic peptide
  XENP020414 vlCDR3
QHFWGTPWT

SEQ ID NO: 22541 - protein, 449 aa, Artificial Sequence; identical to SEQ ID NO: 22461
  Description of Artificial Sequence: Synthetic polypeptide
  XENP020415 4C8_H0L0_IgG1_PVA_/S267K Heavy Chain

SEQ ID NO: 22542 - protein, 120 aa, Artificial Sequence; identical to SEQ ID NO: 22462
  Description of Artificial Sequence: Synthetic polypeptide
  VH of XENP020415

SEQ ID NO: 22543 - protein, 5 aa, Artificial Sequence
  Description of Artificial Sequence: Synthetic peptide
  XENP020415 vhCDR1
DYNVH

SEQ ID NO: 22544 - protein, 17 aa, Artificial Sequence
  Description of Artificial Sequence: Synthetic peptide
  XENP020415 vhCDR2
YIYPYTGGTGYNQKFKS

SEQ ID NO: 22545 - protein, 11 aa, Artificial Sequence
  Description of Artificial Sequence: Synthetic peptide
  XENP020415 vhCDR3
SDDGYSYAMDY

SEQ ID NO: 22546 - protein, 213 aa, Artificial Sequence; identical to SEQ ID NO: 22466
  Description of Artificial Sequence: Synthetic polypeptide
  XENP020415 4C8_H0L0_IgG1_PVA_/S267K Light Chain

SEQ ID NO: 22547 - protein, 106 aa, Artificial Sequence; identical to SEQ ID NO: 22467
  Description of Artificial Sequence: Synthetic polypeptide
  VL of XENP020415

SEQ ID NO: 22548 - protein, 11 aa, Artificial Sequence
  Description of Artificial Sequence: Synthetic peptide
  XENP020415 vlCDR1
RASQDISNYLN

SEQ ID NO: 22549 - protein, 7 aa, Artificial Sequence
  Description of Artificial Sequence: Synthetic peptide
  XENP020415 vlCDR2
YTSRLHS

SEQ ID NO: 22550 - protein, 8 aa, Artificial Sequence
  Description of Artificial Sequence: Synthetic peptide
  XENP020415 vlCDR3
QQGNTLWT

SEQ ID NO: 22551 - protein, 449 aa, Artificial Sequence; identical to SEQ ID NO: 22471
  Description of Artificial Sequence: Synthetic polypeptide
  XENP020416 4C8_H2L1_IgG1_PVA_/S267K Heavy Chain

SEQ ID NO: 22552 - protein, 120 aa, Artificial Sequence; identical to SEQ ID NO: 22472
  Description of Artificial Sequence: Synthetic polypeptide
  VH of XENP020416

SEQ ID NO: 22553 - protein, 5 aa, Artificial Sequence
  Description of Artificial Sequence: Synthetic peptide
  XENP020416 vhCDR1
DYNVH

SEQ ID NO: 22554 - protein, 17 aa, Artificial Sequence
  Description of Artificial Sequence: Synthetic peptide
  XENP020416 vhCDR2
YIYPYTGGTGYNQKFQG

SEQ ID NO: 22555 - protein, 11 aa, Artificial Sequence
  Description of Artificial Sequence: Synthetic peptide
  XENP020416 vhCDR3
SDDGYSYAMDY

SEQ ID NO: 22556 - protein, 213 aa, Artificial Sequence; identical to SEQ ID NO: 22116
  Description of Artificial Sequence: Synthetic polypeptide
  XENP020416 4C8_H2L1_IgG1_PVA_/S267K Light Chain

SEQ ID NO: 22557 - protein, 106 aa, Artificial Sequence; identical to SEQ ID NO: 22117
  Description of Artificial Sequence: Synthetic polypeptide
  VL of XENP020416

SEQ ID NO: 22558 - protein, 11 aa, Artificial Sequence
  Description of Artificial Sequence: Synthetic peptide
  XENP020416 vlCDR1
QASQDISNYLN

SEQ ID NO: 22559 - protein, 7 aa, Artificial Sequence
  Description of Artificial Sequence: Synthetic peptide
  XENP020416 vlCDR2
YTSRLHS

SEQ ID NO: 22560 - protein, 8 aa, Artificial Sequence
  Description of Artificial Sequence: Synthetic peptide
  XENP020416 vlCDR3
QQGNTLWT

SEQ ID NO: 22561 - protein, 450 aa, Artificial Sequence; identical to SEQ ID NO: 22481
  Description of Artificial Sequence: Synthetic polypeptide
  XENP020417 7G8_H3L1_IgG1_PVA_/S267K Heavy Chain

SEQ ID NO: 22562 - protein, 121 aa, Artificial Sequence; identical to SEQ ID NO: 22482
  Description of Artificial Sequence: Synthetic polypeptide
  VH of XENP020417

SEQ ID NO: 22563 - protein, 5 aa, Artificial Sequence
  Description of Artificial Sequence: Synthetic peptide
  XENP020417 vhCDR1
DAWMD

SEQ ID NO: 22564 - protein, 19 aa, Artificial Sequence
  Description of Artificial Sequence: Synthetic peptide
  XENP020417 vhCDR2
EIRTKANNHATYYAESVKG

SEQ ID NO: 22565 - protein, 10 aa, Artificial Sequence
  Description of Artificial Sequence: Synthetic peptide
  XENP020417 vhCDR3
LANWDWYFDV

SEQ ID NO: 22566 - protein, 218 aa, Artificial Sequence; identical to SEQ ID NO: 22276
  Description of Artificial Sequence: Synthetic polypeptide
  XENP020417 7G8_H3L1_IgG1_PVA_/S267K Light Chain

SEQ ID NO: 22567 - protein, 111 aa, Artificial Sequence; identical to SEQ ID NO: 22277
  Description of Artificial Sequence: Synthetic polypeptide
  VL of XENP020417

SEQ ID NO: 22568 - protein, 15 aa, Artificial Sequence
  Description of Artificial Sequence: Synthetic peptide
  XENP020417 vlCDR1
RASQSVDYDGDSYMN

SEQ ID NO: 22569 - protein, 7 aa, Artificial Sequence
  Description of Artificial Sequence: Synthetic peptide
  XENP020417 vlCDR2
AASNLES

SEQ ID NO: 22570 - protein, 9 aa, Artificial Sequence
  Description of Artificial Sequence: Synthetic peptide
  XENP020417 vlCDR3
QQSNEDPFT

SEQ ID NO: 22571 - protein, 450 aa, Artificial Sequence; identical to SEQ ID NO: 22481
  Description of Artificial Sequence: Synthetic polypeptide
  XENP020418 7G8_H3L2_IgG1_PVA_/S267K Heavy Chain

SEQ ID NO: 22572 - protein, 121 aa, Artificial Sequence; identical to SEQ ID NO: 22482
  Description of Artificial Sequence: Synthetic polypeptide
  VH of XENP020418

SEQ ID NO: 22573 - protein, 5 aa, Artificial Sequence
  Description of Artificial Sequence: Synthetic peptide
  XENP020418 vhCDR1
DAWMD

SEQ ID NO: 22574 - protein, 19 aa, Artificial Sequence
  Description of Artificial Sequence: Synthetic peptide
  XENP020418 vhCDR2
EIRTKANNHATYYAESVKG

SEQ ID NO: 22575 - protein, 10 aa, Artificial Sequence
  Description of Artificial Sequence: Synthetic peptide
  XENP020418 vhCDR3
LANWDWYFDV

SEQ ID NO: 22576 - protein, 218 aa, Artificial Sequence; identical to SEQ ID NO: 22286
  Description of Artificial Sequence: Synthetic polypeptide
  XENP020418 7G8_H3L2_IgG1_PVA_/S267K Light Chain

SEQ ID NO: 22577 - protein, 111 aa, Artificial Sequence; identical to SEQ ID NO: 22287
  Description of Artificial Sequence: Synthetic polypeptide
  VL of XENP020418

SEQ ID NO: 22578 - protein, 15 aa, Artificial Sequence
  Description of Artificial Sequence: Synthetic peptide
  XENP020418 vlCDR1
RASQSVDYDGDSYMN

SEQ ID NO: 22579 - protein, 7 aa, Artificial Sequence
  Description of Artificial Sequence: Synthetic peptide
  XENP020418 vlCDR2
AASNLES

SEQ ID NO: 22580 - protein, 9 aa, Artificial Sequence
  Description of Artificial Sequence: Synthetic peptide
  XENP020418 vlCDR3
QQSNEDPFT

SEQ ID NO: 22581 - protein, 450 aa, Artificial Sequence; identical to SEQ ID NO: 22481
  Description of Artificial Sequence: Synthetic polypeptide
  XENP020419 7G8_H3L3_IgG1_PVA_/S267K Heavy Chain

SEQ ID NO: 22582 - protein, 121 aa, Artificial Sequence; identical to SEQ ID NO: 22482
  Description of Artificial Sequence: Synthetic polypeptide
  VH of XENP020419

SEQ ID NO: 22583 - protein, 5 aa, Artificial Sequence
  Description of Artificial Sequence: Synthetic peptide
  XENP020419 vhCDR1
DAWMD

SEQ ID NO: 22584 - protein, 19 aa, Artificial Sequence
  Description of Artificial Sequence: Synthetic peptide
  XENP020419 vhCDR2
EIRTKANNHATYYAESVKG

SEQ ID NO: 22585 - protein, 10 aa, Artificial Sequence
  Description of Artificial Sequence: Synthetic peptide
  XENP020419 vhCDR3
LANWDWYFDV

SEQ ID NO: 22586 - protein, 218 aa, Artificial Sequence; identical to SEQ ID NO: 22296
  Description of Artificial Sequence: Synthetic polypeptide
  XENP020419 7G8_H3L3_IgG1_PVA_/S267K Light Chain

SEQ ID NO: 22587 - protein, 111 aa, Artificial Sequence; identical to SEQ ID NO: 22297
  Description of Artificial Sequence: Synthetic polypeptide
  VL of XENP020419

SEQ ID NO: 22588 - protein, 15 aa, Artificial Sequence
  Description of Artificial Sequence: Synthetic peptide
  XENP020419 vlCDR1
KASQSVDYDGDSYMN

SEQ ID NO: 22589 - protein, 7 aa, Artificial Sequence
  Description of Artificial Sequence: Synthetic peptide
  XENP020419 vlCDR2
AASNLES

SEQ ID NO: 22590 - protein, 9 aa, Artificial Sequence
  Description of Artificial Sequence: Synthetic peptide
  XENP020419 vlCDR3
QQSNEDPFT

SEQ ID NO: 22591 - protein, 449 aa, Artificial Sequence; identical to SEQ ID NO: 22111
  Description of Artificial Sequence: Synthetic polypeptide
  XENP020420 4C8_H1L2_IgG1_PVA_/S267K Heavy Chain

SEQ ID NO: 22592 - protein, 120 aa, Artificial Sequence; identical to SEQ ID NO: 22112
  Description of Artificial Sequence: Synthetic polypeptide
  VH of XENP020420

SEQ ID NO: 22593 - protein, 5 aa, Artificial Sequence
  Description of Artificial Sequence: Synthetic peptide
  XENP020420 vhCDR1
DYNMH

SEQ ID NO: 22594 - protein, 17 aa, Artificial Sequence
  Description of Artificial Sequence: Synthetic peptide
  XENP020420 vhCDR2
YIYPYTGGTGYNQKFQG

SEQ ID NO: 22595 - protein, 11 aa, Artificial Sequence
  Description of Artificial Sequence: Synthetic peptide
  XENP020420 vhCDR3
SDDGYSYAMDY

SEQ ID NO: 22596 - protein, 213 aa, Artificial Sequence
  Description of Artificial Sequence: Synthetic polypeptide
  XENP020420 4C8_H1L2_IgG1_PVA_/S267K Light Chain
DIQMTQSPSSLSASVGDRVTITCRASQDISNYLNWYQQKPGKAPKLLIYYTSRLHSGVPSRFSGSGSGTDYTLTISSLQPEDFATYFCQQGNTLWTFGGGTKVEIKRTVAAPSVFIFPPSDEQLKSGTASVVCLLNNFYPREAKVQWKVDNALQSGNSQESVTEQDSKDSTYSLSSTLTLSKADYEKHKVYACEVTHQGLSSPVTKSFNRGEC

SEQ ID NO: 22597 - protein, 106 aa, Artificial Sequence
  Description of Artificial Sequence: Synthetic polypeptide
  VL of XENP020420
DIQMTQSPSSLSASVGDRVTITCRASQDISNYLNWYQQKPGKAPKLLIYYTSRLHSGVPSRFSGSGSGTDYTLTISSLQPEDFATYFCQQGNTLWTFGGGTKVEIK

SEQ ID NO: 22598 - protein, 11 aa, Artificial Sequence
  Description of Artificial Sequence: Synthetic peptide
  XENP020420 vlCDR1
RASQDISNYLN

SEQ ID NO: 22599 - protein, 7 aa, Artificial Sequence
  Description of Artificial Sequence: Synthetic peptide
  XENP020420 vlCDR2
YTSRLHS

SEQ ID NO: 22600 - protein, 8 aa, Artificial Sequence
  Description of Artificial Sequence: Synthetic peptide
  XENP020420 vlCDR3
QQGNTLWT

SEQ ID NO: 22601 - protein, 449 aa, Artificial Sequence; identical to SEQ ID NO: 22471
  Description of Artificial Sequence: Synthetic polypeptide
  XENP020421 4C8_H2L2_IgG1_PVA_/S267K Heavy Chain

SEQ ID NO: 22602 - protein, 120 aa, Artificial Sequence; identical to SEQ ID NO: 22472
  Description of Artificial Sequence: Synthetic polypeptide
  VH of XENP020421

SEQ ID NO: 22603 - protein, 5 aa, Artificial Sequence
  Description of Artificial Sequence: Synthetic peptide
  XENP020421 vhCDR1
DYNVH

SEQ ID NO: 22604 - protein, 17 aa, Artificial Sequence
  Description of Artificial Sequence: Synthetic peptide
  XENP020421 vhCDR2
YIYPYTGGTGYNQKFQG

SEQ ID NO: 22605 - protein, 11 aa, Artificial Sequence
  Description of Artificial Sequence: Synthetic peptide
  XENP020421 vhCDR3
SDDGYSYAMDY

SEQ ID NO: 22606 - protein, 213 aa, Artificial Sequence; identical to SEQ ID NO: 22596
  Description of Artificial Sequence: Synthetic polypeptide
  XENP020421 4C8_H2L2_IgG1_PVA_/S267K Light Chain

SEQ ID NO: 22607 - protein, 106 aa, Artificial Sequence; identical to SEQ ID NO: 22597
  Description of Artificial Sequence: Synthetic polypeptide
  VL of XENP020421

SEQ ID NO: 22608 - protein, 11 aa, Artificial Sequence
  Description of Artificial Sequence: Synthetic peptide
  XENP020421 vlCDR1
RASQDISNYLN

SEQ ID NO: 22609 - protein, 7 aa, Artificial Sequence
  Description of Artificial Sequence: Synthetic peptide
  XENP020421 vlCDR2
YTSRLHS

SEQ ID NO: 22610 - protein, 8 aa, Artificial Sequence
  Description of Artificial Sequence: Synthetic peptide
  XENP020421 vlCDR3
QQGNTLWT

SEQ ID NO: 22611 - protein, 447 aa, Artificial Sequence; identical to SEQ ID NO: 21901
  Description of Artificial Sequence: Synthetic polypeptide
  XENP019361 2A11_H0L0_IgG1_PVA_/S267K Heavy Chain

SEQ ID NO: 22612 - protein, 118 aa, Artificial Sequence; identical to SEQ ID NO: 21902
  Description of Artificial Sequence: Synthetic polypeptide
  VH of XENP019361

SEQ ID NO: 22613 - protein, 5 aa, Artificial Sequence
  Description of Artificial Sequence: Synthetic peptide
  XENP019361 vhCDR1
DYYMH

SEQ ID NO: 22614 - protein, 17 aa, Artificial Sequence
  Description of Artificial Sequence: Synthetic peptide
  XENP019361 vhCDR2
WIDPENGDTEYAPKFQG

SEQ ID NO: 22615 - protein, 9 aa, Artificial Sequence
  Description of Artificial Sequence: Synthetic peptide
  XENP019361 vhCDR3
RGVRQALDY

SEQ ID NO: 22616 - protein, 214 aa, Artificial Sequence; identical to SEQ ID NO: 21906
  Description of Artificial Sequence: Synthetic polypeptide
  XENP019361 2A11_H0L0_IgG1_PVA_/S267K Light Chain

SEQ ID NO: 22617 - protein, 107 aa, Artificial Sequence; identical to SEQ ID NO: 21907
  Description of Artificial Sequence: Synthetic polypeptide
  VL of XENP019361

SEQ ID NO: 22618 - protein, 11 aa, Artificial Sequence
  Description of Artificial Sequence: Synthetic peptide
  XENP019361 vlCDR1
RASQDIGNYLN

SEQ ID NO: 22619 - protein, 7 aa, Artificial Sequence
  Description of Artificial Sequence: Synthetic peptide
  XENP019361 vlCDR2
YTSRLHS

SEQ ID NO: 22620 - protein, 9 aa, Artificial Sequence
  Description of Artificial Sequence: Synthetic peptide
  XENP019361 vlCDR3
QQGNTLPYT

SEQ ID NO: 22621 - protein, 447 aa, Artificial Sequence; identical to SEQ ID NO: 2885
  Description of Artificial Sequence: Synthetic polypeptide
  XENP019362 2A11_H1L1_IgG1_PVA_/S267K Heavy Chain

SEQ ID NO: 22622 - protein, 118 aa, Artificial Sequence; identical to SEQ ID NO: 2686
  Description of Artificial Sequence: Synthetic polypeptide
  VH of XENP019362

SEQ ID NO: 22623 - protein, 5 aa, Artificial Sequence
  Description of Artificial Sequence: Synthetic peptide
  XENP019362 vhCDR1
DYYMH

SEQ ID NO: 22624 - protein, 17 aa, Artificial Sequence
  Description of Artificial Sequence: Synthetic peptide
  XENP019362 vhCDR2
WIDPENGDTEYAPKFQG

SEQ ID NO: 22625 - protein, 9 aa, Artificial Sequence
  Description of Artificial Sequence: Synthetic peptide
  XENP019362 vhCDR3
RGVRQALDY

SEQ ID NO: 22626 - protein, 214 aa, Artificial Sequence; identical to SEQ ID NO: 21916
  Description of Artificial Sequence: Synthetic polypeptide
  XENP019362 2A11_H1L1_IgG1_PVA_/S267K Light Chain

SEQ ID NO: 22627 - protein, 107 aa, Artificial Sequence; identical to SEQ ID NO: 21917
  Description of Artificial Sequence: Synthetic polypeptide
  VL of XENP019362

SEQ ID NO: 22628 - protein, 11 aa, Artificial Sequence
  Description of Artificial Sequence: Synthetic peptide
  XENP019362 vlCDR1
RASQDIGNYLN

SEQ ID NO: 22629 - protein, 7 aa, Artificial Sequence
  Description of Artificial Sequence: Synthetic peptide
  XENP019362 vlCDR2
YTSRLHS

SEQ ID NO: 22630 - protein, 9 aa, Artificial Sequence
  Description of Artificial Sequence: Synthetic peptide
  XENP019362 vlCDR3
QQGNTLPYT

SEQ ID NO: 22631 - protein, 447 aa, Artificial Sequence; identical to SEQ ID NO: 2885
  Description of Artificial Sequence: Synthetic polypeptide
  XENP019363 2A11_H1L2_IgG1_PVA_/S267K Heavy Chain

SEQ ID NO: 22632 - protein, 118 aa, Artificial Sequence; identical to SEQ ID NO: 2686
  Description of Artificial Sequence: Synthetic polypeptide
  VH of XENP019363

SEQ ID NO: 22633 - protein, 5 aa, Artificial Sequence
  Description of Artificial Sequence: Synthetic peptide
  XENP019363 vhCDR1
DYYMH

SEQ ID NO: 22634 - protein, 17 aa, Artificial Sequence
  Description of Artificial Sequence: Synthetic peptide
  XENP019363 vhCDR2
WIDPENGDTEYAPKFQG

SEQ ID NO: 22635 - protein, 9 aa, Artificial Sequence
  Description of Artificial Sequence: Synthetic peptide
  XENP019363 vhCDR3
RGVRQALDY

SEQ ID NO: 22636 - protein, 214 aa, Artificial Sequence; identical to SEQ ID NO: 2880
  Description of Artificial Sequence: Synthetic polypeptide
  XENP019363 2A11_H1L2_IgG1_PVA_/S267K Light Chain

SEQ ID NO: 22637 - protein, 107 aa, Artificial Sequence; identical to SEQ ID NO: 2881
  Description of Artificial Sequence: Synthetic polypeptide
  VL of XENP019363

SEQ ID NO: 22638 - protein, 11 aa, Artificial Sequence
  Description of Artificial Sequence: Synthetic peptide
  XENP019363 vlCDR1
QASQDIGNYLN

SEQ ID NO: 22639 - protein, 7 aa, Artificial Sequence
  Description of Artificial Sequence: Synthetic peptide
  XENP019363 vlCDR2
YTSRLHS

SEQ ID NO: 22640 - protein, 9 aa, Artificial Sequence
  Description of Artificial Sequence: Synthetic peptide
  XENP019363 vlCDR3
QQGNTLPYT

SEQ ID NO: 22641 - protein, 446 aa, Artificial Sequence; identical to SEQ ID NO: 21931
  Description of Artificial Sequence: Synthetic polypeptide
  XENP019364 2A11_H2L1_IgG1_PVA_/S267K Heavy Chain

SEQ ID NO: 22642 - protein, 117 aa, Artificial Sequence; identical to SEQ ID NO: 21932
  Description of Artificial Sequence: Synthetic polypeptide
  VH of XENP019364

SEQ ID NO: 22643 - protein, 5 aa, Artificial Sequence
  Description of Artificial Sequence: Synthetic peptide
  XENP019364 vhCDR1
DYYMH

SEQ ID NO: 22644 - protein, 17 aa, Artificial Sequence
  Description of Artificial Sequence: Synthetic peptide
  XENP019364 vhCDR2
WIDPENGDTEYAPKFQG

SEQ ID NO: 22645 - protein, 8 aa, Artificial Sequence
  Description of Artificial Sequence: Synthetic peptide
  XENP019364 vhCDR3
GVRQALDY

SEQ ID NO: 22646 - protein, 214 aa, Artificial Sequence; identical to SEQ ID NO: 21916
  Description of Artificial Sequence: Synthetic polypeptide
  XENP019364 2A11_H2L1_IgG1_PVA_/S267K Light Chain

SEQ ID NO: 22647 - protein, 107 aa, Artificial Sequence; identical to SEQ ID NO: 21917
  Description of Artificial Sequence: Synthetic polypeptide
  VL of XENP019364

SEQ ID NO: 22648 - protein, 11 aa, Artificial Sequence
  Description of Artificial Sequence: Synthetic peptide
  XENP019364 vlCDR1
RASQDIGNYLN

SEQ ID NO: 22649 - protein, 7 aa, Artificial Sequence
  Description of Artificial Sequence: Synthetic peptide
  XENP019364 vlCDR2
YTSRLHS

SEQ ID NO: 22650 - protein, 9 aa, Artificial Sequence
  Description of Artificial Sequence: Synthetic peptide
  XENP019364 vlCDR3
QQGNTLPYT

SEQ ID NO: 22651 - protein, 446 aa, Artificial Sequence; identical to SEQ ID NO: 21931
  Description of Artificial Sequence: Synthetic polypeptide
  XENP019365 2A11_H2L2_IgG1_PVA_/S267K Heavy Chain

SEQ ID NO: 22652 - protein, 117 aa, Artificial Sequence; identical to SEQ ID NO: 21932
  Description of Artificial Sequence: Synthetic polypeptide
  VH of XENP019365

SEQ ID NO: 22653 - protein, 5 aa, Artificial Sequence
  Description of Artificial Sequence: Synthetic peptide
  XENP019365 vhCDR1
DYYMH

SEQ ID NO: 22654 - protein, 17 aa, Artificial Sequence
  Description of Artificial Sequence: Synthetic peptide
  XENP019365 vhCDR2
WIDPENGDTEYAPKFQG

SEQ ID NO: 22655 - protein, 8 aa, Artificial Sequence
  Description of Artificial Sequence: Synthetic peptide
  XENP019365 vhCDR3
GVRQALDY

SEQ ID NO: 22656 - protein, 214 aa, Artificial Sequence; identical to SEQ ID NO: 2880
  Description of Artificial Sequence: Synthetic polypeptide
  XENP019365 2A11_H2L2_IgG1_PVA_/S267K Light Chain

SEQ ID NO: 22657 - protein, 107 aa, Artificial Sequence; identical to SEQ ID NO: 2881
  Description of Artificial Sequence: Synthetic polypeptide
  VL of XENP019365

SEQ ID NO: 22658 - protein, 11 aa, Artificial Sequence
  Description of Artificial Sequence: Synthetic peptide
  XENP019365 vlCDR1
QASQDIGNYLN

SEQ ID NO: 22659 - protein, 7 aa, Artificial Sequence
  Description of Artificial Sequence: Synthetic peptide
  XENP019365 vlCDR2
YTSRLHS

SEQ ID NO: 22660 - protein, 9 aa, Artificial Sequence
  Description of Artificial Sequence: Synthetic peptide
  XENP019365 vlCDR3
QQGNTLPYT

SEQ ID NO: 22661 - protein, 447 aa, Artificial Sequence; identical to SEQ ID NO: 21951
  Description of Artificial Sequence: Synthetic polypeptide
  XENP019366 2A11_H3L1_IgG1_PVA_/S267K Heavy Chain

SEQ ID NO: 22662 - protein, 118 aa, Artificial Sequence; identical to SEQ ID NO: 21952
  Description of Artificial Sequence: Synthetic polypeptide
  VH of XENP019366

SEQ ID NO: 22663 - protein, 5 aa, Artificial Sequence
  Description of Artificial Sequence: Synthetic peptide
  XENP019366 vhCDR1
DYYMH

SEQ ID NO: 22664 - protein, 17 aa, Artificial Sequence
  Description of Artificial Sequence: Synthetic peptide
  XENP019366 vhCDR2
WIDPENGDTEYAPSVKG

SEQ ID NO: 22665 - protein, 9 aa, Artificial Sequence
  Description of Artificial Sequence: Synthetic peptide
  XENP019366 vhCDR3
RGVRQALDY

SEQ ID NO: 22666 - protein, 214 aa, Artificial Sequence; identical to SEQ ID NO: 21916
  Description of Artificial Sequence: Synthetic polypeptide
  XENP019366 2A11_H3L1_IgG1_PVA_/S267K Light Chain

SEQ ID NO: 22667 - protein, 107 aa, Artificial Sequence; identical to SEQ ID NO: 21917
  Description of Artificial Sequence: Synthetic polypeptide
  VL of XENP019366

SEQ ID NO: 22668 - protein, 11 aa, Artificial Sequence
  Description of Artificial Sequence: Synthetic peptide
  XENP019366 vlCDR1
RASQDIGNYLN

SEQ ID NO: 22669 - protein, 7 aa, Artificial Sequence
  Description of Artificial Sequence: Synthetic peptide
  XENP019366 vlCDR2
YTSRLHS

SEQ ID NO: 22670 - protein, 9 aa, Artificial Sequence
  Description of Artificial Sequence: Synthetic peptide
  XENP019366 vlCDR3
QQGNTLPYT

SEQ ID NO: 22671 - protein, 447 aa, Artificial Sequence; identical to SEQ ID NO: 21951
  Description of Artificial Sequence: Synthetic polypeptide
  XENP019367 2A11_H3L2_IgG1_PVA_/S267K Heavy Chain

SEQ ID NO: 22672 - protein, 118 aa, Artificial Sequence; identical to SEQ ID NO: 21952
  Description of Artificial Sequence: Synthetic polypeptide
  VH of XENP019367

SEQ ID NO: 22673 - protein, 5 aa, Artificial Sequence
  Description of Artificial Sequence: Synthetic peptide
  XENP019367 vhCDR1
DYYMH

SEQ ID NO: 22674 - protein, 17 aa, Artificial Sequence
  Description of Artificial Sequence: Synthetic peptide
  XENP019367 vhCDR2
WIDPENGDTEYAPSVKG

SEQ ID NO: 22675 - protein, 9 aa, Artificial Sequence
  Description of Artificial Sequence: Synthetic peptide
  XENP019367 vhCDR3
RGVRQALDY

SEQ ID NO: 22676 - protein, 214 aa, Artificial Sequence; identical to SEQ ID NO: 2880
  Description of Artificial Sequence: Synthetic polypeptide
  XENP019367 2A11_H3L2_IgG1_PVA_/S267K Light Chain

SEQ ID NO: 22677 - protein, 107 aa, Artificial Sequence; identical to SEQ ID NO: 2881
  Description of Artificial Sequence: Synthetic polypeptide
  VL of XENP019367

SEQ ID NO: 22678 - protein, 11 aa, Artificial Sequence
  Description of Artificial Sequence: Synthetic peptide
  XENP019367 vlCDR1
QASQDIGNYLN

SEQ ID NO: 22679 - protein, 7 aa, Artificial Sequence
  Description of Artificial Sequence: Synthetic peptide
  XENP019367 vlCDR2
YTSRLHS

SEQ ID NO: 22680 - protein, 9 aa, Artificial Sequence
  Description of Artificial Sequence: Synthetic peptide
  XENP019367 vlCDR3
QQGNTLPYT

SEQ ID NO: 22681 - protein, 446 aa, Artificial Sequence; identical to SEQ ID NO: 21971
  Description of Artificial Sequence: Synthetic polypeptide
  XENP019368 2A11_H4L1_IgG1_PVA_/S267K Heavy Chain

SEQ ID NO: 22682 - protein, 117 aa, Artificial Sequence; identical to SEQ ID NO: 21972
  Description of Artificial Sequence: Synthetic polypeptide
  VH of XENP019368

SEQ ID NO: 22683 - protein, 5 aa, Artificial Sequence
  Description of Artificial Sequence: Synthetic peptide
  XENP019368 vhCDR1
DYYMH

SEQ ID NO: 22684 - protein, 17 aa, Artificial Sequence
  Description of Artificial Sequence: Synthetic peptide
  XENP019368 vhCDR2
WIDPENGDTEYAPSVKG

SEQ ID NO: 22685 - protein, 8 aa, Artificial Sequence
  Description of Artificial Sequence: Synthetic peptide
  XENP019368 vhCDR3
GVRQALDY

SEQ ID NO: 22686 - protein, 214 aa, Artificial Sequence; identical to SEQ ID NO: 21916
  Description of Artificial Sequence: Synthetic polypeptide
  XENP019368 2A11_H4L1_IgG1_PVA_/S267K Light Chain

SEQ ID NO: 22687 - protein, 107 aa, Artificial Sequence; identical to SEQ ID NO: 21917
  Description of Artificial Sequence: Synthetic polypeptide
  VL of XENP019368

SEQ ID NO: 22688 - protein, 11 aa, Artificial Sequence
  Description of Artificial Sequence: Synthetic peptide
  XENP019368 vlCDR1
RASQDIGNYLN

SEQ ID NO: 22689 - protein, 7 aa, Artificial Sequence
  Description of Artificial Sequence: Synthetic peptide
  XENP019368 vlCDR2
YTSRLHS

SEQ ID NO: 22690 - protein, 9 aa, Artificial Sequence
  Description of Artificial Sequence: Synthetic peptide
  XENP019368 vlCDR3
QQGNTLPYT

SEQ ID NO: 22691 - protein, 446 aa, Artificial Sequence; identical to SEQ ID NO: 21971
  Description of Artificial Sequence: Synthetic polypeptide
  XENP019369 2A11_H4L2_IgG1_PVA_/S267K Heavy Chain

SEQ ID NO: 22692 - protein, 117 aa, Artificial Sequence; identical to SEQ ID NO: 21972
  Description of Artificial Sequence: Synthetic polypeptide
  VH of XENP019369

SEQ ID NO: 22693 - protein, 5 aa, Artificial Sequence
  Description of Artificial Sequence: Synthetic peptide
  XENP019369 vhCDR1
DYYMH

SEQ ID NO: 22694 - protein, 17 aa, Artificial Sequence
  Description of Artificial Sequence: Synthetic peptide
  XENP019369 vhCDR2
WIDPENGDTEYAPSVKG

SEQ ID NO: 22695 - protein, 8 aa, Artificial Sequence
  Description of Artificial Sequence: Synthetic peptide
  XENP019369 vhCDR3
GVRQALDY

SEQ ID NO: 22696 - protein, 214 aa, Artificial Sequence; identical to SEQ ID NO: 2880
  Description of Artificial Sequence: Synthetic polypeptide
  XENP019369 2A11_H4L2_IgG1_PVA_/S267K Light Chain

SEQ ID NO: 22697 - protein, 107 aa, Artificial Sequence; identical to SEQ ID NO: 2881
  Description of Artificial Sequence: Synthetic polypeptide
  VL of XENP019369

SEQ ID NO: 22698 - protein, 11 aa, Artificial Sequence
  Description of Artificial Sequence: Synthetic peptide
  XENP019369 vlCDR1
QASQDIGNYLN

SEQ ID NO: 22699 - protein, 7 aa, Artificial Sequence
  Description of Artificial Sequence: Synthetic peptide
  XENP019369 vlCDR2
YTSRLHS

SEQ ID NO: 22700 - protein, 9 aa, Artificial Sequence
  Description of Artificial Sequence: Synthetic peptide
  XENP019369 vlCDR3
QQGNTLPYT

SEQ ID NO: 22701 - protein, 447 aa, Artificial Sequence; identical to SEQ ID NO: 2885
  Description of Artificial Sequence: Synthetic polypeptide
  XENP020023 2A11_H1L0_IgG1_PVA_/S267K Heavy Chain

SEQ ID NO: 22702 - protein, 118 aa, Artificial Sequence; identical to SEQ ID NO: 2686
  Description of Artificial Sequence: Synthetic polypeptide
  VH of XENP020023

SEQ ID NO: 22703 - protein, 5 aa, Artificial Sequence
  Description of Artificial Sequence: Synthetic peptide
  XENP020023 vhCDR1
DYYMH

SEQ ID NO: 22704 - protein, 17 aa, Artificial Sequence
  Description of Artificial Sequence: Synthetic peptide
  XENP020023 vhCDR2
WIDPENGDTEYAPKFQG

SEQ ID NO: 22705 - protein, 9 aa, Artificial Sequence
  Description of Artificial Sequence: Synthetic peptide
  XENP020023 vhCDR3
RGVRQALDY

SEQ ID NO: 22706 - protein, 214 aa, Artificial Sequence; identical to SEQ ID NO: 21906
  Description of Artificial Sequence: Synthetic polypeptide
  XENP020023 2A11_H1L0_IgG1_PVA_/S267K Light Chain

SEQ ID NO: 22707 - protein, 107 aa, Artificial Sequence; identical to SEQ ID NO: 21907
  Description of Artificial Sequence: Synthetic polypeptide
  VL of XENP020023

SEQ ID NO: 22708 - protein, 11 aa, Artificial Sequence
  Description of Artificial Sequence: Synthetic peptide
  XENP020023 vlCDR1
RASQDIGNYLN

SEQ ID NO: 22709 - protein, 7 aa, Artificial Sequence
  Description of Artificial Sequence: Synthetic peptide
  XENP020023 vlCDR2
YTSRLHS

SEQ ID NO: 22710 - protein, 9 aa, Artificial Sequence
  Description of Artificial Sequence: Synthetic peptide
  XENP020023 vlCDR3
QQGNTLPYT

SEQ ID NO: 22711 - protein, 447 aa, Artificial Sequence; identical to SEQ ID NO: 21901
  Description of Artificial Sequence: Synthetic polypeptide
  XENP020024 2A11_H0L1_IgG1_PVA_/S267K Heavy Chain

SEQ ID NO: 22712 - protein, 118 aa, Artificial Sequence; identical to SEQ ID NO: 21902
  Description of Artificial Sequence: Synthetic polypeptide
  VH of XENP020024

SEQ ID NO: 22713 - protein, 5 aa, Artificial Sequence
  Description of Artificial Sequence: Synthetic peptide
  XENP020024 vhCDR1
DYYMH

SEQ ID NO: 22714 - protein, 17 aa, Artificial Sequence
  Description of Artificial Sequence: Synthetic peptide
  XENP020024 vhCDR2
WIDPENGDTEYAPKFQG

SEQ ID NO: 22715 - protein, 9 aa, Artificial Sequence
  Description of Artificial Sequence: Synthetic peptide
  XENP020024 vhCDR3
RGVRQALDY

SEQ ID NO: 22716 - protein, 214 aa, Artificial Sequence; identical to SEQ ID NO: 21916
  Description of Artificial Sequence: Synthetic polypeptide
  XENP020024 2A11_H0L1_IgG1_PVA_/S267K Light Chain

SEQ ID NO: 22717 - protein, 107 aa, Artificial Sequence; identical to SEQ ID NO: 21917
  Description of Artificial Sequence: Synthetic polypeptide
  VL of XENP020024

SEQ ID NO: 22718 - protein, 11 aa, Artificial Sequence
  Description of Artificial Sequence: Synthetic peptide
  XENP020024 vlCDR1
RASQDIGNYLN

SEQ ID NO: 22719 - protein, 7 aa, Artificial Sequence
  Description of Artificial Sequence: Synthetic peptide
  XENP020024 vlCDR2
YTSRLHS

SEQ ID NO: 22720 - protein, 9 aa, Artificial Sequence
  Description of Artificial Sequence: Synthetic peptide
  XENP020024 vlCDR3
QQGNTLPYT

SEQ ID NO: 22721 - protein, 450 aa, Artificial Sequence; identical to SEQ ID NO: 22261
  Description of Artificial Sequence: Synthetic polypeptide
  XENP019401 7G8_H0L0_IgG1_PVA_/S267K Heavy Chain

SEQ ID NO: 22722 - protein, 121 aa, Artificial Sequence; identical to SEQ ID NO: 22262
  Description of Artificial Sequence: Synthetic polypeptide
  VH of XENP019401

SEQ ID NO: 22723 - protein, 5 aa, Artificial Sequence
  Description of Artificial Sequence: Synthetic peptide
  XENP019401 vhCDR1
DAWMD

SEQ ID NO: 22724 - protein, 19 aa, Artificial Sequence
  Description of Artificial Sequence: Synthetic peptide
  XENP019401 vhCDR2
EIRTKANNHATYYAESVKG

SEQ ID NO: 22725 - protein, 10 aa, Artificial Sequence
  Description of Artificial Sequence: Synthetic peptide
  XENP019401 vhCDR3
LANWDWYFDV

SEQ ID NO: 22726 - protein, 218 aa, Artificial Sequence; identical to SEQ ID NO: 22266
  Description of Artificial Sequence: Synthetic polypeptide
  XENP019401 7G8_H0L0_IgG1_PVA_/S267K Light Chain

SEQ ID NO: 22727 - protein, 111 aa, Artificial Sequence; identical to SEQ ID NO: 22267
  Description of Artificial Sequence: Synthetic polypeptide
  VL of XENP019401

SEQ ID NO: 22728 - protein, 15 aa, Artificial Sequence
  Description of Artificial Sequence: Synthetic peptide
  XENP019401 vlCDR1
KASQSVDYDGDSYMN

SEQ ID NO: 22729 - protein, 7 aa, Artificial Sequence
  Description of Artificial Sequence: Synthetic peptide
  XENP019401 vlCDR2
AASNLES

SEQ ID NO: 22730 - protein, 9 aa, Artificial Sequence
  Description of Artificial Sequence: Synthetic peptide
  XENP019401 vlCDR3
QQSNEDPFT

SEQ ID NO: 22731 - protein, 450 aa, Artificial Sequence; identical to SEQ ID NO: 22271
  Description of Artificial Sequence: Synthetic polypeptide
  XENP019402 7G8_H1L1_IgG1_PVA_/S267K Heavy Chain

SEQ ID NO: 22732 - protein, 121 aa, Artificial Sequence; identical to SEQ ID NO: 22272
  Description of Artificial Sequence: Synthetic polypeptide
  VH of XENP019402

SEQ ID NO: 22733 - protein, 5 aa, Artificial Sequence
  Description of Artificial Sequence: Synthetic peptide
  XENP019402 vhCDR1
DAWMD

SEQ ID NO: 22734 - protein, 19 aa, Artificial Sequence
  Description of Artificial Sequence: Synthetic peptide
  XENP019402 vhCDR2
EIRTKANNHATYYAEKFQG

SEQ ID NO: 22735 - protein, 10 aa, Artificial Sequence
  Description of Artificial Sequence: Synthetic peptide
  XENP019402 vhCDR3
LANWDWYFDV

SEQ ID NO: 22736 - protein, 218 aa, Artificial Sequence; identical to SEQ ID NO: 22276
  Description of Artificial Sequence: Synthetic polypeptide
  XENP019402 7G8_H1L1_IgG1_PVA_/S267K Light Chain

SEQ ID NO: 22737 - protein, 111 aa, Artificial Sequence; identical to SEQ ID NO: 22277
  Description of Artificial Sequence: Synthetic polypeptide
  VL of XENP019402

SEQ ID NO: 22738 - protein, 15 aa, Artificial Sequence
  Description of Artificial Sequence: Synthetic peptide
  XENP019402 vlCDR1
RASQSVDYDGDSYMN

SEQ ID NO: 22739 - protein, 7 aa, Artificial Sequence
  Description of Artificial Sequence: Synthetic peptide
  XENP019402 vlCDR2
AASNLES

SEQ ID NO: 22740 - protein, 9 aa, Artificial Sequence
  Description of Artificial Sequence: Synthetic peptide
  XENP019402 vlCDR3
QQSNEDPFT

SEQ ID NO: 22741 - protein, 450 aa, Artificial Sequence; identical to SEQ ID NO: 22271
  Description of Artificial Sequence: Synthetic polypeptide
  XENP019403 7G8_H1L2_IgG1_PVA_/S267K Heavy Chain

SEQ ID NO: 22742 - protein, 121 aa, Artificial Sequence; identical to SEQ ID NO: 22272
  Description of Artificial Sequence: Synthetic polypeptide
  VH of XENP019403

SEQ ID NO: 22743 - protein, 5 aa, Artificial Sequence
  Description of Artificial Sequence: Synthetic peptide
  XENP019403 vhCDR1
DAWMD

SEQ ID NO: 22744 - protein, 19 aa, Artificial Sequence
  Description of Artificial Sequence: Synthetic peptide
  XENP019403 vhCDR2
EIRTKANNHATYYAEKFQG

SEQ ID NO: 22745 - protein, 10 aa, Artificial Sequence
  Description of Artificial Sequence: Synthetic peptide
  XENP019403 vhCDR3
LANWDWYFDV

SEQ ID NO: 22746 - protein, 218 aa, Artificial Sequence; identical to SEQ ID NO: 22286
  Description of Artificial Sequence: Synthetic polypeptide
  XENP019403 7G8_H1L2_IgG1_PVA_/S267K Light Chain

SEQ ID NO: 22747 - protein, 111 aa, Artificial Sequence; identical to SEQ ID NO: 22287
  Description of Artificial Sequence: Synthetic polypeptide
  VL of XENP019403

SEQ ID NO: 22748 - protein, 15 aa, Artificial Sequence
  Description of Artificial Sequence: Synthetic peptide
  XENP019403 vlCDR1
RASQSVDYDGDSYMN

SEQ ID NO: 22749 - protein, 7 aa, Artificial Sequence
  Description of Artificial Sequence: Synthetic peptide
  XENP019403 vlCDR2
AASNLES

SEQ ID NO: 22750 - protein, 9 aa, Artificial Sequence
  Description of Artificial Sequence: Synthetic peptide
  XENP019403 vlCDR3
QQSNEDPFT

SEQ ID NO: 22751 - protein, 450 aa, Artificial Sequence; identical to SEQ ID NO: 22271
  Description of Artificial Sequence: Synthetic polypeptide
  XENP019404 7G8_H1L3_IgG1_PVA_/S267K Heavy Chain

SEQ ID NO: 22752 - protein, 121 aa, Artificial Sequence; identical to SEQ ID NO: 22272
  Description of Artificial Sequence: Synthetic polypeptide
  VH of XENP019404

SEQ ID NO: 22753 - protein, 5 aa, Artificial Sequence
  Description of Artificial Sequence: Synthetic peptide
  XENP019404 vhCDR1
DAWMD

SEQ ID NO: 22754 - protein, 19 aa, Artificial Sequence
  Description of Artificial Sequence: Synthetic peptide
  XENP019404 vhCDR2
EIRTKANNHATYYAEKFQG

SEQ ID NO: 22755 - protein, 10 aa, Artificial Sequence
  Description of Artificial Sequence: Synthetic peptide
  XENP019404 vhCDR3
LANWDWYFDV

SEQ ID NO: 22756 - protein, 218 aa, Artificial Sequence; identical to SEQ ID NO: 22296
  Description of Artificial Sequence: Synthetic polypeptide
  XENP019404 7G8_H1L3_IgG1_PVA_/S267K Light Chain

SEQ ID NO: 22757 - protein, 111 aa, Artificial Sequence; identical to SEQ ID NO: 22297
  Description of Artificial Sequence: Synthetic polypeptide
  VL of XENP019404

SEQ ID NO: 22758 - protein, 15 aa, Artificial Sequence
  Description of Artificial Sequence: Synthetic peptide
  XENP019404 vlCDR1
KASQSVDYDGDSYMN

SEQ ID NO: 22759 - protein, 7 aa, Artificial Sequence
  Description of Artificial Sequence: Synthetic peptide
  XENP019404 vlCDR2
AASNLES

SEQ ID NO: 22760 - protein, 9 aa, Artificial Sequence
  Description of Artificial Sequence: Synthetic peptide
  XENP019404 vlCDR3
QQSNEDPFT

SEQ ID NO: 22761 - protein, 450 aa, Artificial Sequence; identical to SEQ ID NO: 22301
  Description of Artificial Sequence: Synthetic polypeptide
  XENP019405 7G8_H2L1_IgG1_PVA_/S267K Heavy Chain

SEQ ID NO: 22762 - protein, 121 aa, Artificial Sequence; identical to SEQ ID NO: 22302
  Description of Artificial Sequence: Synthetic polypeptide
  VH of XENP019405

SEQ ID NO: 22763 - protein, 5 aa, Artificial Sequence
  Description of Artificial Sequence: Synthetic peptide
  XENP019405 vhCDR1
DAWMD

SEQ ID NO: 22764 - protein, 19 aa, Artificial Sequence
  Description of Artificial Sequence: Synthetic peptide
  XENP019405 vhCDR2
EIRTKANNHATYYAESVKG

SEQ ID NO: 22765 - protein, 10 aa, Artificial Sequence
  Description of Artificial Sequence: Synthetic peptide
  XENP019405 vhCDR3
LANWDWYFDV

SEQ ID NO: 22766 - protein, 218 aa, Artificial Sequence; identical to SEQ ID NO: 22276
  Description of Artificial Sequence: Synthetic polypeptide
  XENP019405 7G8_H2L1_IgG1_PVA_/S267K Light Chain

SEQ ID NO: 22767 - protein, 111 aa, Artificial Sequence; identical to SEQ ID NO: 22277
  Description of Artificial Sequence: Synthetic polypeptide
  VL of XENP019405

SEQ ID NO: 22768 - protein, 15 aa, Artificial Sequence
  Description of Artificial Sequence: Synthetic peptide
  XENP019405 vlCDR1
RASQSVDYDGDSYMN

SEQ ID NO: 22769 - protein, 7 aa, Artificial Sequence
  Description of Artificial Sequence: Synthetic peptide
  XENP019405 vlCDR2
AASNLES

SEQ ID NO: 22770 - protein, 9 aa, Artificial Sequence
  Description of Artificial Sequence: Synthetic peptide
  XENP019405 vlCDR3
QQSNEDPFT

SEQ ID NO: 22771 - protein, 450 aa, Artificial Sequence; identical to SEQ ID NO: 22301
  Description of Artificial Sequence: Synthetic polypeptide
  XENP019406 7G8_H2L2_IgG1_PVA_/S267K Heavy Chain

SEQ ID NO: 22772 - protein, 121 aa, Artificial Sequence; identical to SEQ ID NO: 22302
  Description of Artificial Sequence: Synthetic polypeptide
  VH of XENP019406

SEQ ID NO: 22773 - protein, 5 aa, Artificial Sequence
  Description of Artificial Sequence: Synthetic peptide
  XENP019406 vhCDR1
DAWMD

SEQ ID NO: 22774 - protein, 19 aa, Artificial Sequence
  Description of Artificial Sequence: Synthetic peptide
  XENP019406 vhCDR2
EIRTKANNHATYYAESVKG

SEQ ID NO: 22775 - protein, 10 aa, Artificial Sequence
  Description of Artificial Sequence: Synthetic peptide
  XENP019406 vhCDR3
LANWDWYFDV

SEQ ID NO: 22776 - protein, 218 aa, Artificial Sequence; identical to SEQ ID NO: 22286
  Description of Artificial Sequence: Synthetic polypeptide
  XENP019406 7G8_H2L2_IgG1_PVA_/S267K Light Chain

SEQ ID NO: 22777 - protein, 111 aa, Artificial Sequence; identical to SEQ ID NO: 22287
  Description of Artificial Sequence: Synthetic polypeptide
  VL of XENP019406

SEQ ID NO: 22778 - protein, 15 aa, Artificial Sequence
  Description of Artificial Sequence: Synthetic peptide
  XENP019406 vlCDR1
RASQSVDYDGDSYMN

SEQ ID NO: 22779 - protein, 7 aa, Artificial Sequence
  Description of Artificial Sequence: Synthetic peptide
  XENP019406 vlCDR2
AASNLES

SEQ ID NO: 22780 - protein, 9 aa, Artificial Sequence
  Description of Artificial Sequence: Synthetic peptide
  XENP019406 vlCDR3
QQSNEDPFT

SEQ ID NO: 22781 - protein, 450 aa, Artificial Sequence; identical to SEQ ID NO: 22301
  Description of Artificial Sequence: Synthetic polypeptide
  XENP019407 7G8_H2L3_IgG1_PVA_/S267K Heavy Chain

SEQ ID NO: 22782 - protein, 121 aa, Artificial Sequence; identical to SEQ ID NO: 22302
  Description of Artificial Sequence: Synthetic polypeptide
  VH of XENP019407

SEQ ID NO: 22783 - protein, 5 aa, Artificial Sequence
  Description of Artificial Sequence: Synthetic peptide
  XENP019407 vhCDR1
DAWMD

SEQ ID NO: 22784 - protein, 19 aa, Artificial Sequence
  Description of Artificial Sequence: Synthetic peptide
  XENP019407 vhCDR2
EIRTKANNHATYYAESVKG

SEQ ID NO: 22785 - protein, 10 aa, Artificial Sequence
  Description of Artificial Sequence: Synthetic peptide
  XENP019407 vhCDR3
LANWDWYFDV

SEQ ID NO: 22786 - protein, 218 aa, Artificial Sequence; identical to SEQ ID NO: 22296
  Description of Artificial Sequence: Synthetic polypeptide
  XENP019407 7G8_H2L3_IgG1_PVA_/S267K Light Chain

SEQ ID NO: 22787 - protein, 111 aa, Artificial Sequence; identical to SEQ ID NO: 22297
  Description of Artificial Sequence: Synthetic polypeptide
  VL of XENP019407

SEQ ID NO: 22788 - protein, 15 aa, Artificial Sequence
  Description of Artificial Sequence: Synthetic peptide
  XENP019407 vlCDR1
KASQSVDYDGDSYMN

SEQ ID NO: 22789 - protein, 7 aa, Artificial Sequence
  Description of Artificial Sequence: Synthetic peptide
  XENP019407 vlCDR2
AASNLES

SEQ ID NO: 22790 - protein, 9 aa, Artificial Sequence
  Description of Artificial Sequence: Synthetic peptide
  XENP019407 vlCDR3
QQSNEDPFT

SEQ ID NO: 22791 - protein, 450 aa, Artificial Sequence; identical to SEQ ID NO: 22271
  Description of Artificial Sequence: Synthetic polypeptide
  XENP020028 7G8_H1L0_IgG1_PVA_/S267K Heavy Chain

SEQ ID NO: 22792 - protein, 121 aa, Artificial Sequence; identical to SEQ ID NO: 22272
  Description of Artificial Sequence: Synthetic polypeptide
  VH of XENP020028

SEQ ID NO: 22793 - protein, 5 aa, Artificial Sequence
  Description of Artificial Sequence: Synthetic peptide
  XENP020028 vhCDR1
DAWMD

SEQ ID NO: 22794 - protein, 19 aa, Artificial Sequence
  Description of Artificial Sequence: Synthetic peptide
  XENP020028 vhCDR2
EIRTKANNHATYYAEKFQG

SEQ ID NO: 22795 - protein, 10 aa, Artificial Sequence
  Description of Artificial Sequence: Synthetic peptide
  XENP020028 vhCDR3
LANWDWYFDV

SEQ ID NO: 22796 - protein, 218 aa, Artificial Sequence; identical to SEQ ID NO: 22266
  Description of Artificial Sequence: Synthetic polypeptide
  XENP020028 7G8_H1L0_IgG1_PVA_/S267K Light Chain

SEQ ID NO: 22797 - protein, 111 aa, Artificial Sequence; identical to SEQ ID NO: 22267
  Description of Artificial Sequence: Synthetic polypeptide
  VL of XENP020028

SEQ ID NO: 22798 - protein, 15 aa, Artificial Sequence
  Description of Artificial Sequence: Synthetic peptide
  XENP020028 vlCDR1
KASQSVDYDGDSYMN

SEQ ID NO: 22799 - protein, 7 aa, Artificial Sequence
  Description of Artificial Sequence: Synthetic peptide
  XENP020028 vlCDR2
AASNLES

SEQ ID NO: 22800 - protein, 9 aa, Artificial Sequence
  Description of Artificial Sequence: Synthetic peptide
  XENP020028 vlCDR3
QQSNEDPFT

SEQ ID NO: 22801 - protein, 450 aa, Artificial Sequence; identical to SEQ ID NO: 22261
  Description of Artificial Sequence: Synthetic polypeptide
  XENP020029 7G8_H0L1_IgG1_PVA_/S267K Heavy Chain

SEQ ID NO: 22802 - protein, 121 aa, Artificial Sequence; identical to SEQ ID NO: 22262
  Description of Artificial Sequence: Synthetic polypeptide
  VH of XENP020029

SEQ ID NO: 22803 - protein, 5 aa, Artificial Sequence
  Description of Artificial Sequence: Synthetic peptide
  XENP020029 vhCDR1
DAWMD

SEQ ID NO: 22804 - protein, 19 aa, Artificial Sequence
  Description of Artificial Sequence: Synthetic peptide
  XENP020029 vhCDR2
EIRTKANNHATYYAESVKG

SEQ ID NO: 22805 - protein, 10 aa, Artificial Sequence
  Description of Artificial Sequence: Synthetic peptide
  XENP020029 vhCDR3
LANWDWYFDV

SEQ ID NO: 22806 - protein, 218 aa, Artificial Sequence; identical to SEQ ID NO: 22276
  Description of Artificial Sequence: Synthetic polypeptide
  XENP020029 7G8_H0L1_IgG1_PVA_/S267K Light Chain

SEQ ID NO: 22807 - protein, 111 aa, Artificial Sequence; identical to SEQ ID NO: 22277
  Description of Artificial Sequence: Synthetic polypeptide
  VL of XENP020029

SEQ ID NO: 22808 - protein, 15 aa, Artificial Sequence
  Description of Artificial Sequence: Synthetic peptide
  XENP020029 vlCDR1
RASQSVDYDGDSYMN

SEQ ID NO: 22809 - protein, 7 aa, Artificial Sequence
  Description of Artificial Sequence: Synthetic peptide
  XENP020029 vlCDR2
AASNLES

SEQ ID NO: 22810 - protein, 9 aa, Artificial Sequence
  Description of Artificial Sequence: Synthetic peptide
  XENP020029 vlCDR3
QQSNEDPFT

SEQ ID NO: 22811 - protein, 450 aa, Artificial Sequence; identical to SEQ ID NO: 22301
  Description of Artificial Sequence: Synthetic polypeptide
  XENP020262 7G8_H2L0_IgG1_PVA_/S267K Heavy Chain

SEQ ID NO: 22812 - protein, 121 aa, Artificial Sequence; identical to SEQ ID NO: 22302
  Description of Artificial Sequence: Synthetic polypeptide
  VH of XENP020262

SEQ ID NO: 22813 - protein, 5 aa, Artificial Sequence
  Description of Artificial Sequence: Synthetic peptide
  XENP020262 vhCDR1
DAWMD

SEQ ID NO: 22814 - protein, 19 aa, Artificial Sequence
  Description of Artificial Sequence: Synthetic peptide
  XENP020262 vhCDR2
EIRTKANNHATYYAESVKG

SEQ ID NO: 22815 - protein, 10 aa, Artificial Sequence
  Description of Artificial Sequence: Synthetic peptide
  XENP020262 vhCDR3
LANWDWYFDV

SEQ ID NO: 22816 - protein, 218 aa, Artificial Sequence; identical to SEQ ID NO: 22266
  Description of Artificial Sequence: Synthetic polypeptide
  XENP020262 7G8_H2L0_IgG1_PVA_/S267K Light Chain

SEQ ID NO: 22817 - protein, 111 aa, Artificial Sequence; identical to SEQ ID NO: 22267
  Description of Artificial Sequence: Synthetic polypeptide
  VL of XENP020262

SEQ ID NO: 22818 - protein, 15 aa, Artificial Sequence
  Description of Artificial Sequence: Synthetic peptide
  XENP020262 vlCDR1
KASQSVDYDGDSYMN

SEQ ID NO: 22819 - protein, 7 aa, Artificial Sequence
  Description of Artificial Sequence: Synthetic peptide
  XENP020262 vlCDR2
AASNLES

SEQ ID NO: 22820 - protein, 9 aa, Artificial Sequence
  Description of Artificial Sequence: Synthetic peptide
  XENP020262 vlCDR3
QQSNEDPFT

SEQ ID NO: 22821 - protein, 450 aa, Artificial Sequence; identical to SEQ ID NO: 22261
  Description of Artificial Sequence: Synthetic polypeptide
  XENP020263 7G8_H0L2_IgG1_PVA_/S267K Heavy Chain

SEQ ID NO: 22822 - protein, 121 aa, Artificial Sequence; identical to SEQ ID NO: 22262
  Description of Artificial Sequence: Synthetic polypeptide
  VH of XENP020263

SEQ ID NO: 22823 - protein, 5 aa, Artificial Sequence
  Description of Artificial Sequence: Synthetic peptide
  XENP020263 vhCDR1
DAWMD

SEQ ID NO: 22824 - protein, 19 aa, Artificial Sequence
  Description of Artificial Sequence: Synthetic peptide
  XENP020263 vhCDR2
EIRTKANNHATYYAESVKG

SEQ ID NO: 22825 - protein, 10 aa, Artificial Sequence
  Description of Artificial Sequence: Synthetic peptide
  XENP020263 vhCDR3
LANWDWYFDV

SEQ ID NO: 22826 - protein, 218 aa, Artificial Sequence; identical to SEQ ID NO: 22286
  Description of Artificial Sequence: Synthetic polypeptide
  XENP020263 7G8_H0L2_IgG1_PVA_/S267K Light Chain

SEQ ID NO: 22827 - protein, 111 aa, Artificial Sequence; identical to SEQ ID NO: 22287
  Description of Artificial Sequence: Synthetic polypeptide
  VL of XENP020263

SEQ ID NO: 22828 - protein, 15 aa, Artificial Sequence
  Description of Artificial Sequence: Synthetic peptide
  XENP020263 vlCDR1
RASQSVDYDGDSYMN

SEQ ID NO: 22829 - protein, 7 aa, Artificial Sequence
  Description of Artificial Sequence: Synthetic peptide
  XENP020263 vlCDR2
AASNLES

SEQ ID NO: 22830 - protein, 9 aa, Artificial Sequence
  Description of Artificial Sequence: Synthetic peptide
  XENP020263 vlCDR3
QQSNEDPFT

SEQ ID NO: 22831 - protein, 450 aa, Artificial Sequence; identical to SEQ ID NO: 22481
  Description of Artificial Sequence: Synthetic polypeptide
  XENP020417 7G8_H3L1_IgG1_PVA_/S267K Heavy Chain

SEQ ID NO: 22832 - protein, 121 aa, Artificial Sequence; identical to SEQ ID NO: 22482
  Description of Artificial Sequence: Synthetic polypeptide
  VH of XENP020417

SEQ ID NO: 22833 - protein, 5 aa, Artificial Sequence
  Description of Artificial Sequence: Synthetic peptide
  XENP020417 vhCDR1
DAWMD

SEQ ID NO: 22834 - protein, 19 aa, Artificial Sequence
  Description of Artificial Sequence: Synthetic peptide
  XENP020417 vhCDR2
EIRTKANNHATYYAESVKG

SEQ ID NO: 22835 - protein, 10 aa, Artificial Sequence
  Description of Artificial Sequence: Synthetic peptide
  XENP020417 vhCDR3
LANWDWYFDV

SEQ ID NO: 22836 - protein, 218 aa, Artificial Sequence; identical to SEQ ID NO: 22276
  Description of Artificial Sequence: Synthetic polypeptide
  XENP020417 7G8_H3L1_IgG1_PVA_/S267K Light Chain

SEQ ID NO: 22837 - protein, 111 aa, Artificial Sequence; identical to SEQ ID NO: 22277
  Description of Artificial Sequence: Synthetic polypeptide
  VL of XENP020417

SEQ ID NO: 22838 - protein, 15 aa, Artificial Sequence
  Description of Artificial Sequence: Synthetic peptide
  XENP020417 vlCDR1
RASQSVDYDGDSYMN

SEQ ID NO: 22839 - protein, 7 aa, Artificial Sequence
  Description of Artificial Sequence: Synthetic peptide
  XENP020417 vlCDR2
AASNLES

SEQ ID NO: 22840 - protein, 9 aa, Artificial Sequence
  Description of Artificial Sequence: Synthetic peptide
  XENP020417 vlCDR3
QQSNEDPFT

SEQ ID NO: 22841 - protein, 450 aa, Artificial Sequence; identical to SEQ ID NO: 22481
  Description of Artificial Sequence: Synthetic polypeptide
  XENP020418 7G8_H3L2_IgG1_PVA_/S267K Heavy Chain

SEQ ID NO: 22842 - protein, 121 aa, Artificial Sequence; identical to SEQ ID NO: 22482
  Description of Artificial Sequence: Synthetic polypeptide
  VH of XENP020418

SEQ ID NO: 22843 - protein, 5 aa, Artificial Sequence
  Description of Artificial Sequence: Synthetic peptide
  XENP020418 vhCDR1
DAWMD

SEQ ID NO: 22844 - protein, 19 aa, Artificial Sequence
  Description of Artificial Sequence: Synthetic peptide
  XENP020418 vhCDR2
EIRTKANNHATYYAESVKG

SEQ ID NO: 22845 - protein, 10 aa, Artificial Sequence
  Description of Artificial Sequence: Synthetic peptide
  XENP020418 vhCDR3
LANWDWYFDV

SEQ ID NO: 22846 - protein, 218 aa, Artificial Sequence; identical to SEQ ID NO: 22286
  Description of Artificial Sequence: Synthetic polypeptide
  XENP020418 7G8_H3L2_IgG1_PVA_/S267K Light Chain

SEQ ID NO: 22847 - protein, 111 aa, Artificial Sequence; identical to SEQ ID NO: 22287
  Description of Artificial Sequence: Synthetic polypeptide
  VL of XENP020418

SEQ ID NO: 22848 - protein, 15 aa, Artificial Sequence
  Description of Artificial Sequence: Synthetic peptide
  XENP020418 vlCDR1
RASQSVDYDGDSYMN

SEQ ID NO: 22849 - protein, 7 aa, Artificial Sequence
  Description of Artificial Sequence: Synthetic peptide
  XENP020418 vlCDR2
AASNLES

SEQ ID NO: 22850 - protein, 9 aa, Artificial Sequence
  Description of Artificial Sequence: Synthetic peptide
  XENP020418 vlCDR3
QQSNEDPFT

SEQ ID NO: 22851 - protein, 450 aa, Artificial Sequence; identical to SEQ ID NO: 22481
  Description of Artificial Sequence: Synthetic polypeptide
  XENP020419 7G8_H3L3_IgG1_PVA_/S267K Heavy Chain

SEQ ID NO: 22852 - protein, 121 aa, Artificial Sequence; identical to SEQ ID NO: 22482
  Description of Artificial Sequence: Synthetic polypeptide
  VH of XENP020419

SEQ ID NO: 22853 - protein, 5 aa, Artificial Sequence
  Description of Artificial Sequence: Synthetic peptide
  XENP020419 vhCDR1
DAWMD

SEQ ID NO: 22854 - protein, 19 aa, Artificial Sequence
  Description of Artificial Sequence: Synthetic peptide
  XENP020419 vhCDR2
EIRTKANNHATYYAESVKG

SEQ ID NO: 22855 - protein, 10 aa, Artificial Sequence
  Description of Artificial Sequence: Synthetic peptide
  XENP020419 vhCDR3
LANWDWYFDV

SEQ ID NO: 22856 - protein, 218 aa, Artificial Sequence; identical to SEQ ID NO: 22296
  Description of Artificial Sequence: Synthetic polypeptide
  XENP020419 7G8_H3L3_IgG1_PVA_/S267K Light Chain

SEQ ID NO: 22857 - protein, 111 aa, Artificial Sequence; identical to SEQ ID NO: 22297
  Description of Artificial Sequence: Synthetic polypeptide
  VL of XENP020419

SEQ ID NO: 22858 - protein, 15 aa, Artificial Sequence
  Description of Artificial Sequence: Synthetic peptide
  XENP020419 vlCDR1
KASQSVDYDGDSYMN

SEQ ID NO: 22859 - protein, 7 aa, Artificial Sequence
  Description of Artificial Sequence: Synthetic peptide
  XENP020419 vlCDR2
AASNLES

SEQ ID NO: 22860 - protein, 9 aa, Artificial Sequence
  Description of Artificial Sequence: Synthetic peptide
  XENP020419 vlCDR3
QQSNEDPFT

SEQ ID NO: 22861 - protein, 450 aa, Artificial Sequence; identical to SEQ ID NO: 22481
  Description of Artificial Sequence: Synthetic polypeptide
  XENP020417 7G8_H3L1_IgG1_PVA_/S267K Heavy Chain

SEQ ID NO: 22862 - protein, 121 aa, Artificial Sequence; identical to SEQ ID NO: 22482
  Description of Artificial Sequence: Synthetic polypeptide
  VH of XENP020417

SEQ ID NO: 22863 - protein, 5 aa, Artificial Sequence
  Description of Artificial Sequence: Synthetic peptide
  XENP020417 vhCDR1
DAWMD

SEQ ID NO: 22864 - protein, 19 aa, Artificial Sequence
  Description of Artificial Sequence: Synthetic peptide
  XENP020417 vhCDR2
EIRTKANNHATYYAESVKG

SEQ ID NO: 22865 - protein, 10 aa, Artificial Sequence
  Description of Artificial Sequence: Synthetic peptide
  XENP020417 vhCDR3
LANWDWYFDV

SEQ ID NO: 22866 - protein, 218 aa, Artificial Sequence; identical to SEQ ID NO: 22276
  Description of Artificial Sequence: Synthetic polypeptide
  XENP020417 7G8_H3L1_IgG1_PVA_/S267K Light Chain

SEQ ID NO: 22867 - protein, 111 aa, Artificial Sequence; identical to SEQ ID NO: 22277
  Description of Artificial Sequence: Synthetic polypeptide
  VL of XENP020417

SEQ ID NO: 22868 - protein, 15 aa, Artificial Sequence
  Description of Artificial Sequence: Synthetic peptide
  XENP020417 vlCDR1
RASQSVDYDGDSYMN

SEQ ID NO: 22869 - protein, 7 aa, Artificial Sequence
  Description of Artificial Sequence: Synthetic peptide
  XENP020417 vlCDR2
AASNLES

SEQ ID NO: 22870 - protein, 9 aa, Artificial Sequence
  Description of Artificial Sequence: Synthetic peptide
  XENP020417 vlCDR3
QQSNEDPFT

SEQ ID NO: 22871 - protein, 450 aa, Artificial Sequence; identical to SEQ ID NO: 22481
  Description of Artificial Sequence: Synthetic polypeptide
  XENP020418 7G8_H3L2_IgG1_PVA_/S267K Heavy Chain

SEQ ID NO: 22872 - protein, 121 aa, Artificial Sequence; identical to SEQ ID NO: 22482
  Description of Artificial Sequence: Synthetic polypeptide
  VH of XENP020418

SEQ ID NO: 22873 - protein, 5 aa, Artificial Sequence
  Description of Artificial Sequence: Synthetic peptide
  XENP020418 vhCDR1
DAWMD

SEQ ID NO: 22874 - protein, 19 aa, Artificial Sequence
  Description of Artificial Sequence: Synthetic peptide
  XENP020418 vhCDR2
EIRTKANNHATYYAESVKG

SEQ ID NO: 22875 - protein, 10 aa, Artificial Sequence
  Description of Artificial Sequence: Synthetic peptide
  XENP020418 vhCDR3
LANWDWYFDV

SEQ ID NO: 22876 - protein, 218 aa, Artificial Sequence; identical to SEQ ID NO: 22286
  Description of Artificial Sequence: Synthetic polypeptide
  XENP020418 7G8_H3L2_IgG1_PVA_/S267K Light Chain

SEQ ID NO: 22877 - protein, 111 aa, Artificial Sequence; identical to SEQ ID NO: 22287
  Description of Artificial Sequence: Synthetic polypeptide
  VL of XENP020418

SEQ ID NO: 22878 - protein, 15 aa, Artificial Sequence
  Description of Artificial Sequence: Synthetic peptide
  XENP020418 vlCDR1
RASQSVDYDGDSYMN

SEQ ID NO: 22879 - protein, 7 aa, Artificial Sequence
  Description of Artificial Sequence: Synthetic peptide
  XENP020418 vlCDR2
AASNLES

SEQ ID NO: 22880 - protein, 9 aa, Artificial Sequence
  Description of Artificial Sequence: Synthetic peptide
  XENP020418 vlCDR3
QQSNEDPFT

SEQ ID NO: 22881 - protein, 450 aa, Artificial Sequence; identical to SEQ ID NO: 22481
  Description of Artificial Sequence: Synthetic polypeptide
  XENP020419 7G8_H3L3_IgG1_PVA_/S267K Heavy Chain

SEQ ID NO: 22882 - protein, 121 aa, Artificial Sequence; identical to SEQ ID NO: 22482
  Description of Artificial Sequence: Synthetic polypeptide
  VH of XENP020419

SEQ ID NO: 22883 - protein, 5 aa, Artificial Sequence
  Description of Artificial Sequence: Synthetic peptide
  XENP020419 vhCDR1
DAWMD

SEQ ID NO: 22884 - protein, 19 aa, Artificial Sequence
  Description of Artificial Sequence: Synthetic peptide
  XENP020419 vhCDR2
EIRTKANNHATYYAESVKG

SEQ ID NO: 22885 - protein, 10 aa, Artificial Sequence
  Description of Artificial Sequence: Synthetic peptide
  XENP020419 vhCDR3
LANWDWYFDV

SEQ ID NO: 22886 - protein, 218 aa, Artificial Sequence; identical to SEQ ID NO: 22296
  Description of Artificial Sequence: Synthetic polypeptide
  XENP020419 7G8_H3L3_IgG1_PVA_/S267K Light Chain

SEQ ID NO: 22887 - protein, 111 aa, Artificial Sequence; identical to SEQ ID NO: 22297
  Description of Artificial Sequence: Synthetic polypeptide
  VL of XENP020419

SEQ ID NO: 22888 - protein, 15 aa, Artificial Sequence
  Description of Artificial Sequence: Synthetic peptide
  XENP020419 vlCDR1
KASQSVDYDGDSYMN

SEQ ID NO: 22889 - protein, 7 aa, Artificial Sequence
  Description of Artificial Sequence: Synthetic peptide
  XENP020419 vlCDR2
AASNLES

SEQ ID NO: 22890 - protein, 9 aa, Artificial Sequence
  Description of Artificial Sequence: Synthetic peptide
  XENP020419 vlCDR3
QQSNEDPFT

SEQ ID NO: 22891 - protein, 450 aa, Artificial Sequence
  Description of Artificial Sequence: Synthetic polypeptide
  XENP020449 7G8_H0.1_L0_IgG1_PVA_/S267K Heavy Chain
EVKLEESGGGLVQPGGSMKLSCAASGYTFSDAWMDWVRQSPEKGLEWVAEIRTKANNHATYYAESVKGRFTISRDDSKSSVYLQMNSLRAEDTGIYYCTRLANWDWYFDVWGAGTTVTVSSASTKGPSVFPLAPSSKSTSGGTAALGCLVKDYFPEPVTVSWNSGALTSGVHTFPAVLQSSGLYSLSSVVTVPSSSLGTQTYICNVNHKPSDTKVDKKVEPKSCDKTHTCPPCPAPPVAGPSVFLFPPKPKDTLMISRTPEVTCVVVDVKHEDPEVKFNWYVDGVEVHNAKTKPREEEYNSTYRVVSVLTVLHQDWLNGKEYKCKVSNKALPAPIEKTISKAKGQPREPQVYTLPPSREEMTKNQVSLTCDVSGFYPSDIAVEWESDGQPENNYKTTPPVLDSDGSFFLYSKLTVDKSRWEQGDVFSCSVMHEALHNHYTQKSLSLSPGK

SEQ ID NO: 22892 - protein, 121 aa, Artificial Sequence
  Description of Artificial Sequence: Synthetic polypeptide
  VH of XENP020449
EVKLEESGGGLVQPGGSMKLSCAASGYTFSDAWMDWVRQSPEKGLEWVAEIRTKANNHATYYAESVKGRFTISRDDSKSSVYLQMNSLRAEDTGIYYCTRLANWDWYFDVWGAGTTVTVSS

SEQ ID NO: 22893 - protein, 5 aa, Artificial Sequence
  Description of Artificial Sequence: Synthetic peptide
  XENP020449 vhCDR1
DAWMD

SEQ ID NO: 22894 - protein, 19 aa, Artificial Sequence
  Description of Artificial Sequence: Synthetic peptide
  XENP020449 vhCDR2
EIRTKANNHATYYAESVKG

SEQ ID NO: 22895 - protein, 10 aa, Artificial Sequence
  Description of Artificial Sequence: Synthetic peptide
  XENP020449 vhCDR3
LANWDWYFDV

SEQ ID NO: 22896 - protein, 218 aa, Artificial Sequence; identical to SEQ ID NO: 22266
  Description of Artificial Sequence: Synthetic polypeptide
  XENP020449 7G8_H0.1_L0_IgG1_PVA_/S267K Light Chain

SEQ ID NO: 22897 - protein, 111 aa, Artificial Sequence; identical to SEQ ID NO: 22267
  Description of Artificial Sequence: Synthetic polypeptide
  VL of XENP020449

SEQ ID NO: 22898 - protein, 15 aa, Artificial Sequence
  Description of Artificial Sequence: Synthetic peptide
  XENP020449 vlCDR1
KASQSVDYDGDSYMN

SEQ ID NO: 22899 - protein, 7 aa, Artificial Sequence
  Description of Artificial Sequence: Synthetic peptide
  XENP020449 vlCDR2
AASNLES

SEQ ID NO: 22900 - protein, 9 aa, Artificial Sequence
  Description of Artificial Sequence: Synthetic peptide
  XENP020449 vlCDR3
QQSNEDPFT

SEQ ID NO: 22901 - protein, 450 aa, Artificial Sequence
  Description of Artificial Sequence: Synthetic polypeptide
  XENP020450 7G8_H0.2_L0_IgG1_PVA_/S267K Heavy Chain
EVKLEESGGGLVQPGGSMKLSCAASGGTFSDAWMDWVRQSPEKGLEWVAEIRTKANNHATYYAESVKGRFTISRDDSKSSVYLQMNSLRAEDTGIYYCTRLANWDWYFDVWGAGTTVTVSSASTKGPSVFPLAPSSKSTSGGTAALGCLVKDYFPEPVTVSWNSGALTSGVHTFPAVLQSSGLYSLSSVVTVPSSSLGTQTYICNVNHKPSDTKVDKKVEPKSCDKTHTCPPCPAPPVAGPSVFLFPPKPKDTLMISRTPEVTCVVVDVKHEDPEVKFNWYVDGVEVHNAKTKPREEEYNSTYRVVSVLTVLHQDWLNGKEYKCKVSNKALPAPIEKTISKAKGQPREPQVYTLPPSREEMTKNQVSLTCDVSGFYPSDIAVEWESDGQPENNYKTTPPVLDSDGSFFLYSKLTVDKSRWEQGDVFSCSVMHEALHNHYTQKSLSLSPGK

SEQ ID NO: 22902 - protein, 121 aa, Artificial Sequence
  Description of Artificial Sequence: Synthetic polypeptide
  VH of XENP020450
EVKLEESGGGLVQPGGSMKLSCAASGGTFSDAWMDWVRQSPEKGLEWVAEIRTKANNHATYYAESVKGRFTISRDDSKSSVYLQMNSLRAEDTGIYYCTRLANWDWYFDVWGAGTTVTVSS

SEQ ID NO: 22903 - protein, 5 aa, Artificial Sequence
  Description of Artificial Sequence: Synthetic peptide
  XENP020450 vhCDR1
DAWMD

SEQ ID NO: 22904 - protein, 19 aa, Artificial Sequence
  Description of Artificial Sequence: Synthetic peptide
  XENP020450 vhCDR2
EIRTKANNHATYYAESVKG

SEQ ID NO: 22905 - protein, 10 aa, Artificial Sequence
  Description of Artificial Sequence: Synthetic peptide
  XENP020450 vhCDR3
LANWDWYFDV

SEQ ID NO: 22906 - protein, 218 aa, Artificial Sequence; identical to SEQ ID NO: 22266
  Description of Artificial Sequence: Synthetic polypeptide
  XENP020450 7G8_H0.2_L0_IgG1_PVA_/S267K Light Chain

SEQ ID NO: 22907 - protein, 111 aa, Artificial Sequence; identical to SEQ ID NO: 22267
  Description of Artificial Sequence: Synthetic polypeptide
  VL of XENP020450

SEQ ID NO: 22908 - protein, 15 aa, Artificial Sequence
  Description of Artificial Sequence: Synthetic peptide
  XENP020450 vlCDR1
KASQSVDYDGDSYMN

SEQ ID NO: 22909 - protein, 7 aa, Artificial Sequence
  Description of Artificial Sequence: Synthetic peptide
  XENP020450 vlCDR2
AASNLES

SEQ ID NO: 22910 - protein, 9 aa, Artificial Sequence
  Description of Artificial Sequence: Synthetic peptide
  XENP020450 vlCDR3
QQSNEDPFT

SEQ ID NO: 22911 - protein, 450 aa, Artificial Sequence
  Description of Artificial Sequence: Synthetic polypeptide
  XENP020451 7G8_H0.3_L0_IgG1_PVA_/S267K Heavy Chain
EVKLEESGGGLVQPGGSMKLSCAASGDTFSDAWMDWVRQSPEKGLEWVAEIRTKANNHATYYAESVKGRFTISRDDSKSSVYLQMNSLRAEDTGIYYCTRLANWDWYFDVWGAGTTVTVSSASTKGPSVFPLAPSSKSTSGGTAALGCLVKDYFPEPVTVSWNSGALTSGVHTFPAVLQSSGLYSLSSVVTVPSSSLGTQTYICNVNHKPSDTKVDKKVEPKSCDKTHTCPPCPAPPVAGPSVFLFPPKPKDTLMISRTPEVTCVVVDVKHEDPEVKFNWYVDGVEVHNAKTKPREEEYNSTYRVVSVLTVLHQDWLNGKEYKCKVSNKALPAPIEKTISKAKGQPREPQVYTLPPSREEMTKNQVSLTCDVSGFYPSDIAVEWESDGQPENNYKTTPPVLDSDGSFFLYSKLTVDKSRWEQGDVFSCSVMHEALHNHYTQKSLSLSPGK

SEQ ID NO: 22912 - protein, 121 aa, Artificial Sequence
  Description of Artificial Sequence: Synthetic polypeptide
  VH of XENP020451
EVKLEESGGGLVQPGGSMKLSCAASGDTFSDAWMDWVRQSPEKGLEWVAEIRTKANNHATYYAESVKGRFTISRDDSKSSVYLQMNSLRAEDTGIYYCTRLANWDWYFDVWGAGTTVTVSS

SEQ ID NO: 22913 - protein, 5 aa, Artificial Sequence
  Description of Artificial Sequence: Synthetic peptide
  XENP020451 vhCDR1
DAWMD

SEQ ID NO: 22914 - protein, 19 aa, Artificial Sequence
  Description of Artificial Sequence: Synthetic peptide
  XENP020451 vhCDR2
EIRTKANNHATYYAESVKG

SEQ ID NO: 22915 - protein, 10 aa, Artificial Sequence
  Description of Artificial Sequence: Synthetic peptide
  XENP020451 vhCDR3
LANWDWYFDV

SEQ ID NO: 22916 - protein, 218 aa, Artificial Sequence; identical to SEQ ID NO: 22266
  Description of Artificial Sequence: Synthetic polypeptide
  XENP020451 7G8_H0.3_L0_IgG1_PVA_/S267K Light Chain

SEQ ID NO: 22917 - protein, 111 aa, Artificial Sequence; identical to SEQ ID NO: 22267
  Description of Artificial Sequence: Synthetic polypeptide
  VL of XENP020451

SEQ ID NO: 22918 - protein, 15 aa, Artificial Sequence
  Description of Artificial Sequence: Synthetic peptide
  XENP020451 vlCDR1
KASQSVDYDGDSYMN

SEQ ID NO: 22919 - protein, 7 aa, Artificial Sequence
  Description of Artificial Sequence: Synthetic peptide
  XENP020451 vlCDR2
AASNLES

SEQ ID NO: 22920 - protein, 9 aa, Artificial Sequence
  Description of Artificial Sequence: Synthetic peptide
  XENP020451 vlCDR3
QQSNEDPFT

SEQ ID NO: 22921 - protein, 450 aa, Artificial Sequence
  Description of Artificial Sequence: Synthetic polypeptide
  XENP020452 7G8_H0.4_L0_IgG1_PVA_/S267K Heavy Chain
EVKLEESGGGLVQPGGSMKLSCAASGFSFSDAWMDWVRQSPEKGLEWVAEIRTKANNHATYYAESVKGRFTISRDDSKSSVYLQMNSLRAEDTGIYYCTRLANWDWYFDVWGAGTTVTVSSASTKGPSVFPLAPSSKSTSGGTAALGCLVKDYFPEPVTVSWNSGALTSGVHTFPAVLQSSGLYSLSSVVTVPSSSLGTQTYICNVNHKPSDTKVDKKVEPKSCDKTHTCPPCPAPPVAGPSVFLFPPKPKDTLMISRTPEVTCVVVDVKHEDPEVKFNWYVDGVEVHNAKTKPREEEYNSTYRVVSVLTVLHQDWLNGKEYKCKVSNKALPAPIEKTISKAKGQPREPQVYTLPPSREEMTKNQVSLTCDVSGFYPSDIAVEWESDGQPENNYKTTPPVLDSDGSFFLYSKLTVDKSRWEQGDVFSCSVMHEALHNHYTQKSLSLSPGK

SEQ ID NO: 22922 - protein, 121 aa, Artificial Sequence
  Description of Artificial Sequence: Synthetic polypeptide
  VH of XENP020452
EVKLEESGGGLVQPGGSMKLSCAASGFSFSDAWMDWVRQSPEKGLEWVAEIRTKANNHATYYAESVKGRFTISRDDSKSSVYLQMNSLRAEDTGIYYCTRLANWDWYFDVWGAGTTVTVSS

SEQ ID NO: 22923 - protein, 5 aa, Artificial Sequence
  Description of Artificial Sequence: Synthetic peptide
  XENP020452 vhCDR1
DAWMD

SEQ ID NO: 22924 - protein, 19 aa, Artificial Sequence
  Description of Artificial Sequence: Synthetic peptide
  XENP020452 vhCDR2
EIRTKANNHATYYAESVKG

SEQ ID NO: 22925 - protein, 10 aa, Artificial Sequence
  Description of Artificial Sequence: Synthetic peptide
  XENP020452 vhCDR3
LANWDWYFDV

SEQ ID NO: 22926 - protein, 218 aa, Artificial Sequence; identical to SEQ ID NO: 22266
  Description of Artificial Sequence: Synthetic polypeptide
  XENP020452 7G8_H0.4_L0_IgG1_PVA_/S267K Light Chain

SEQ ID NO: 22927 - protein, 111 aa, Artificial Sequence; identical to SEQ ID NO: 22267
  Description of Artificial Sequence: Synthetic polypeptide
  VL of XENP020452

SEQ ID NO: 22928 - protein, 15 aa, Artificial Sequence
  Description of Artificial Sequence: Synthetic peptide
  XENP020452 vlCDR1
KASQSVDYDGDSYMN

SEQ ID NO: 22929 - protein, 7 aa, Artificial Sequence
  Description of Artificial Sequence: Synthetic peptide
  XENP020452 vlCDR2
AASNLES

SEQ ID NO: 22930 - protein, 9 aa, Artificial Sequence
  Description of Artificial Sequence: Synthetic peptide
  XENP020452 vlCDR3
QQSNEDPFT

SEQ ID NO: 22931 - protein, 450 aa, Artificial Sequence
  Description of Artificial Sequence: Synthetic polypeptide
  XENP020453 7G8_H0.5_L0_IgG1_PVA_/S267K Heavy Chain
EVKLEESGGGLVQPGGSMKLSCAASGFTFTDAWMDWVRQSPEKGLEWVAEIRTKANNHATYYAESVKGRFTISRDDSKSSVYLQMNSLRAEDTGIYYCTRLANWDWYFDVWGAGTTVTVSSASTKGPSVFPLAPSSKSTSGGTAALGCLVKDYFPEPVTVSWNSGALTSGVHTFPAVLQSSGLYSLSSVVTVPSSSLGTQTYICNVNHKPSDTKVDKKVEPKSCDKTHTCPPCPAPPVAGPSVFLFPPKPKDTLMISRTPEVTCVVVDVKHEDPEVKFNWYVDGVEVHNAKTKPREEEYNSTYRVVSVLTVLHQDWLNGKEYKCKVSNKALPAPIEKTISKAKGQPREPQVYTLPPSREEMTKNQVSLTCDVSGFYPSDIAVEWESDGQPENNYKTTPPVLDSDGSFFLYSKLTVDKSRWEQGDVFSCSVMHEALHNHYTQKSLSLSPGK

SEQ ID NO: 22932 - protein, 121 aa, Artificial Sequence
  Description of Artificial Sequence: Synthetic polypeptide
  VH of XENP020453
EVKLEESGGGLVQPGGSMKLSCAASGFTFTDAWMDWVRQSPEKGLEWVAEIRTKANNHATYYAESVKGRFTISRDDSKSSVYLQMNSLRAEDTGIYYCTRLANWDWYFDVWGAGTTVTVSS

SEQ ID NO: 22933 - protein, 5 aa, Artificial Sequence
  Description of Artificial Sequence: Synthetic peptide
  XENP020453 vhCDR1
DAWMD

SEQ ID NO: 22934 - protein, 19 aa, Artificial Sequence
  Description of Artificial Sequence: Synthetic peptide
  XENP020453 vhCDR2
EIRTKANNHATYYAESVKG

SEQ ID NO: 22935 - protein, 10 aa, Artificial Sequence
  Description of Artificial Sequence: Synthetic peptide
  XENP020453 vhCDR3
LANWDWYFDV

SEQ ID NO: 22936 - protein, 218 aa, Artificial Sequence; identical to SEQ ID NO: 22266
  Description of Artificial Sequence: Synthetic polypeptide
  XENP020453 7G8_H0.5_L0_IgG1_PVA_/S267K Light Chain

SEQ ID NO: 22937 - protein, 111 aa, Artificial Sequence; identical to SEQ ID NO: 22267
  Description of Artificial Sequence: Synthetic polypeptide
  VL of XENP020453

SEQ ID NO: 22938 - protein, 15 aa, Artificial Sequence
  Description of Artificial Sequence: Synthetic peptide
  XENP020453 vlCDR1
KASQSVDYDGDSYMN

SEQ ID NO: 22939 - protein, 7 aa, Artificial Sequence
  Description of Artificial Sequence: Synthetic peptide
  XENP020453 vlCDR2
AASNLES

SEQ ID NO: 22940 - protein, 9 aa, Artificial Sequence
  Description of Artificial Sequence: Synthetic peptide
  XENP020453 vlCDR3
QQSNEDPFT

SEQ ID NO: 22941 - protein, 450 aa, Artificial Sequence
  Description of Artificial Sequence: Synthetic polypeptide
  XENP020454 7G8_H0.6_L0_IgG1_PVA_/S267K Heavy Chain
EVKLEESGGGLVQPGGSMKLSCAASGFTFDDAWMDWVRQSPEKGLEWVAEIRTKANNHATYYAESVKGRFTISRDDSKSSVYLQMNSLRAEDTGIYYCTRLANWDWYFDVWGAGTTVTVSSASTKGPSVFPLAPSSKSTSGGTAALGCLVKDYFPEPVTVSWNSGALTSGVHTFPAVLQSSGLYSLSSVVTVPSSSLGTQTYICNVNHKPSDTKVDKKVEPKSCDKTHTCPPCPAPPVAGPSVFLFPPKPKDTLMISRTPEVTCVVVDVKHEDPEVKFNWYVDGVEVHNAKTKPREEEYNSTYRVVSVLTVLHQDWLNGKEYKCKVSNKALPAPIEKTISKAKGQPREPQVYTLPPSREEMTKNQVSLTCDVSGFYPSDIAVEWESDGQPENNYKTTPPVLDSDGSFFLYSKLTVDKSRWEQGDVFSCSVMHEALHNHYTQKSLSLSPGK

SEQ ID NO: 22942 - protein, 121 aa, Artificial Sequence
  Description of Artificial Sequence: Synthetic polypeptide
  VH of XENP020454
EVKLEESGGGLVQPGGSMKLSCAASGFTFDDAWMDWVRQSPEKGLEWVAEIRTKANNHATYYAESVKGRFTISRDDSKSSVYLQMNSLRAEDTGIYYCTRLANWDWYFDVWGAGTTVTVSS

SEQ ID NO: 22943 - protein, 5 aa, Artificial Sequence
  Description of Artificial Sequence: Synthetic peptide
  XENP020454 vhCDR1
DAWMD

SEQ ID NO: 22944 - protein, 19 aa, Artificial Sequence
  Description of Artificial Sequence: Synthetic peptide
  XENP020454 vhCDR2
EIRTKANNHATYYAESVKG

SEQ ID NO: 22945 - protein, 10 aa, Artificial Sequence
  Description of Artificial Sequence: Synthetic peptide
  XENP020454 vhCDR3
LANWDWYFDV

SEQ ID NO: 22946 - protein, 218 aa, Artificial Sequence; identical to SEQ ID NO: 22266
  Description of Artificial Sequence: Synthetic polypeptide
  XENP020454 7G8_H0.6_L0_IgG1_PVA_/S267K Light Chain

SEQ ID NO: 22947 - protein, 111 aa, Artificial Sequence; identical to SEQ ID NO: 22267
  Description of Artificial Sequence: Synthetic polypeptide
  VL of XENP020454

SEQ ID NO: 22948 - protein, 15 aa, Artificial Sequence
  Description of Artificial Sequence: Synthetic peptide
  XENP020454 vlCDR1
KASQSVDYDGDSYMN

SEQ ID NO: 22949 - protein, 7 aa, Artificial Sequence
  Description of Artificial Sequence: Synthetic peptide
  XENP020454 vlCDR2
AASNLES

SEQ ID NO: 22950 - protein, 9 aa, Artificial Sequence
  Description of Artificial Sequence: Synthetic peptide
  XENP020454 vlCDR3
QQSNEDPFT

SEQ ID NO: 22951 - protein, 450 aa, Artificial Sequence
  Description of Artificial Sequence: Synthetic polypeptide
  XENP020455 7G8_H0.7_L0_IgG1_PVA_/S267K Heavy Chain
EVKLEESGGGLVQPGGSMKLSCAASGFTFGDAWMDWVRQSPEKGLEWVAEIRTKANNHATYYAESVKGRFTISRDDSKSSVYLQMNSLRAEDTGIYYCTRLANWDWYFDVWGAGTTVTVSSASTKGPSVFPLAPSSKSTSGGTAALGCLVKDYFPEPVTVSWNSGALTSGVHTFPAVLQSSGLYSLSSVVTVPSSSLGTQTYICNVNHKPSDTKVDKKVEPKSCDKTHTCPPCPAPPVAGPSVFLFPPKPKDTLMISRTPEVTCVVVDVKHEDPEVKFNWYVDGVEVHNAKTKPREEEYNSTYRVVSVLTVLHQDWLNGKEYKCKVSNKALPAPIEKTISKAKGQPREPQVYTLPPSREEMTKNQVSLTCDVSGFYPSDIAVEWESDGQPENNYKTTPPVLDSDGSFFLYSKLTVDKSRWEQGDVFSCSVMHEALHNHYTQKSLSLSPGK

SEQ ID NO: 22952 - protein, 121 aa, Artificial Sequence
  Description of Artificial Sequence: Synthetic polypeptide
  VH of XENP020455
EVKLEESGGGLVQPGGSMKLSCAASGFTFGDAWMDWVRQSPEKGLEWVAEIRTKANNHATYYAESVKGRFTISRDDSKSSVYLQMNSLRAEDTGIYYCTRLANWDWYFDVWGAGTTVTVSS

SEQ ID NO: 22953 - protein, 5 aa, Artificial Sequence
  Description of Artificial Sequence: Synthetic peptide
  XENP020455 vhCDR1
DAWMD

SEQ ID NO: 22954 - protein, 19 aa, Artificial Sequence
  Description of Artificial Sequence: Synthetic peptide
  XENP020455 vhCDR2
EIRTKANNHATYYAESVKG

SEQ ID NO: 22955 - protein, 10 aa, Artificial Sequence
  Description of Artificial Sequence: Synthetic peptide
  XENP020455 vhCDR3
LANWDWYFDV

SEQ ID NO: 22956 - protein, 218 aa, Artificial Sequence; identical to SEQ ID NO: 22266
  Description of Artificial Sequence: Synthetic polypeptide
  XENP020455 7G8_H0.7_L0_IgG1_PVA_/S267K Light Chain

SEQ ID NO: 22957 - protein, 111 aa, Artificial Sequence; identical to SEQ ID NO: 22267
  Description of Artificial Sequence: Synthetic polypeptide
  VL of XENP020455

SEQ ID NO: 22958 - protein, 15 aa, Artificial Sequence
  Description of Artificial Sequence: Synthetic peptide
  XENP020455 vlCDR1
KASQSVDYDGDSYMN

SEQ ID NO: 22959 - protein, 7 aa, Artificial Sequence
  Description of Artificial Sequence: Synthetic peptide
  XENP020455 vlCDR2
AASNLES

SEQ ID NO: 22960 - protein, 9 aa, Artificial Sequence
  Description of Artificial Sequence: Synthetic peptide
  XENP020455 vlCDR3
QQSNEDPFT

SEQ ID NO: 22961 - protein, 450 aa, Artificial Sequence
  Description of Artificial Sequence: Synthetic polypeptide
  XENP020456 7G8_H0.8_L0_IgG1_PVA_/S267K Heavy Chain
EVKLEESGGGLVQPGGSMKLSCAASGFTFSNAWMDWVRQSPEKGLEWVAEIRTKANNHATYYAESVKGRFTISRDDSKSSVYLQMNSLRAEDTGIYYCTRLANWDWYFDVWGAGTTVTVSSASTKGPSVFPLAPSSKSTSGGTAALGCLVKDYFPEPVTVSWNSGALTSGVHTFPAVLQSSGLYSLSSVVTVPSSSLGTQTYICNVNHKPSDTKVDKKVEPKSCDKTHTCPPCPAPPVAGPSVFLFPPKPKDTLMISRTPEVTCVVVDVKHEDPEVKFNWYVDGVEVHNAKTKPREEEYNSTYRVVSVLTVLHQDWLNGKEYKCKVSNKALPAPIEKTISKAKGQPREPQVYTLPPSREEMTKNQVSLTCDVSGFYPSDIAVEWESDGQPENNYKTTPPVLDSDGSFFLYSKLTVDKSRWEQGDVFSCSVMHEALHNHYTQKSLSLSPGK

SEQ ID NO: 22962 - protein, 121 aa, Artificial Sequence
  Description of Artificial Sequence: Synthetic polypeptide
  VH of XENP020456
EVKLEESGGGLVQPGGSMKLSCAASGFTFSNAWMDWVRQSPEKGLEWVAEIRTKANNHATYYAESVKGRFTISRDDSKSSVYLQMNSLRAEDTGIYYCTRLANWDWYFDVWGAGTTVTVSS

SEQ ID NO: 22963 - protein, 5 aa, Artificial Sequence
  Description of Artificial Sequence: Synthetic peptide
  XENP020456 vhCDR1
NAWMD

SEQ ID NO: 22964 - protein, 19 aa, Artificial Sequence
  Description of Artificial Sequence: Synthetic peptide
  XENP020456 vhCDR2
EIRTKANNHATYYAESVKG

SEQ ID NO: 22965 - protein, 10 aa, Artificial Sequence
  Description of Artificial Sequence: Synthetic peptide
  XENP020456 vhCDR3
LANWDWYFDV

SEQ ID NO: 22966 - protein, 218 aa, Artificial Sequence; identical to SEQ ID NO: 22266
  Description of Artificial Sequence: Synthetic polypeptide
  XENP020456 7G8_H0.8_L0_IgG1_PVA_/S267K Light Chain

SEQ ID NO: 22967 - protein, 111 aa, Artificial Sequence; identical to SEQ ID NO: 22267
  Description of Artificial Sequence: Synthetic polypeptide
  VL of XENP020456

SEQ ID NO: 22968 - protein, 15 aa, Artificial Sequence
  Description of Artificial Sequence: Synthetic peptide
  XENP020456 vlCDR1
KASQSVDYDGDSYMN

SEQ ID NO: 22969 - protein, 7 aa, Artificial Sequence
  Description of Artificial Sequence: Synthetic peptide
  XENP020456 vlCDR2
AASNLES

SEQ ID NO: 22970 - protein, 9 aa, Artificial Sequence
  Description of Artificial Sequence: Synthetic peptide
  XENP020456 vlCDR3
QQSNEDPFT

SEQ ID NO: 22971 - protein, 450 aa, Artificial Sequence
  Description of Artificial Sequence: Synthetic polypeptide
  XENP020457 7G8_H0.9_L0_IgG1_PVA_/S267K Heavy Chain
EVKLEESGGGLVQPGGSMKLSCAASGFTFSEAWMDWVRQSPEKGLEWVAEIRTKANNHATYYAESVKGRFTISRDDSKSSVYLQMNSLRAEDTGIYYCTRLANWDWYFDVWGAGTTVTVSSASTKGPSVFPLAPSSKSTSGGTAALGCLVKDYFPEPVTVSWNSGALTSGVHTFPAVLQSSGLYSLSSVVTVPSSSLGTQTYICNVNHKPSDTKVDKKVEPKSCDKTHTCPPCPAPPVAGPSVFLFPPKPKDTLMISRTPEVTCVVVDVKHEDPEVKFNWYVDGVEVHNAKTKPREEEYNSTYRVVSVLTVLHQDWLNGKEYKCKVSNKALPAPIEKTISKAKGQPREPQVYTLPPSREEMTKNQVSLTCDVSGFYPSDIAVEWESDGQPENNYKTTPPVLDSDGSFFLYSKLTVDKSRWEQGDVFSCSVMHEALHNHYTQKSLSLSPGK

SEQ ID NO: 22972 - protein, 121 aa, Artificial Sequence
  Description of Artificial Sequence: Synthetic polypeptide
  VH of XENP020457
EVKLEESGGGLVQPGGSMKLSCAASGFTFSEAWMDWVRQSPEKGLEWVAEIRTKANNHATYYAESVKGRFTISRDDSKSSVYLQMNSLRAEDTGIYYCTRLANWDWYFDVWGAGTTVTVSS

SEQ ID NO: 22973 - protein, 5 aa, Artificial Sequence
  Description of Artificial Sequence: Synthetic peptide
  XENP020457 vhCDR1
EAWMD

SEQ ID NO: 22974 - protein, 19 aa, Artificial Sequence
  Description of Artificial Sequence: Synthetic peptide
  XENP020457 vhCDR2
EIRTKANNHATYYAESVKG

SEQ ID NO: 22975 - protein, 10 aa, Artificial Sequence
  Description of Artificial Sequence: Synthetic peptide
  XENP020457 vhCDR3
LANWDWYFDV

SEQ ID NO: 22976 - protein, 218 aa, Artificial Sequence; identical to SEQ ID NO: 22266
  Description of Artificial Sequence: Synthetic polypeptide
  XENP020457 7G8_H0.9_L0_IgG1_PVA_/S267K Light Chain

SEQ ID NO: 22977 - protein, 111 aa, Artificial Sequence; identical to SEQ ID NO: 22267
  Description of Artificial Sequence: Synthetic polypeptide
  VL of XENP020457

SEQ ID NO: 22978 - protein, 15 aa, Artificial Sequence
  Description of Artificial Sequence: Synthetic peptide
  XENP020457 vlCDR1
KASQSVDYDGDSYMN

SEQ ID NO: 22979 - protein, 7 aa, Artificial Sequence
  Description of Artificial Sequence: Synthetic peptide
  XENP020457 vlCDR2
AASNLES

SEQ ID NO: 22980 - protein, 9 aa, Artificial Sequence
  Description of Artificial Sequence: Synthetic peptide
  XENP020457 vlCDR3
QQSNEDPFT

SEQ ID NO: 22981 - protein, 450 aa, Artificial Sequence
  Description of Artificial Sequence: Synthetic polypeptide
  XENP020458 7G8_H0.10_L0_IgG1_PVA_/S267K Heavy Chain
EVKLEESGGGLVQPGGSMKLSCAASGFTFSHAWMDWVRQSPEKGLEWVAEIRTKANNHATYYAESVKGRFTISRDDSKSSVYLQMNSLRAEDTGIYYCTRLANWDWYFDVWGAGTTVTVSSASTKGPSVFPLAPSSKSTSGGTAALGCLVKDYFPEPVTVSWNSGALTSGVHTFPAVLQSSGLYSLSSVVTVPSSSLGTQTYICNVNHKPSDTKVDKKVEPKSCDKTHTCPPCPAPPVAGPSVFLFPPKPKDTLMISRTPEVTCVVVDVKHEDPEVKFNWYVDGVEVHNAKTKPREEEYNSTYRVVSVLTVLHQDWLNGKEYKCKVSNKALPAPIEKTISKAKGQPREPQVYTLPPSREEMTKNQVSLTCDVSGFYPSDIAVEWESDGQPENNYKTTPPVLDSDGSFFLYSKLTVDKSRWEQGDVFSCSVMHEALHNHYTQKSLSLSPGK

SEQ ID NO: 22982 - protein, 121 aa, Artificial Sequence
  Description of Artificial Sequence: Synthetic polypeptide
  VH of XENP020458
EVKLEESGGGLVQPGGSMKLSCAASGFTFSHAWMDWVRQSPEKGLEWVAEIRTKANNHATYYAESVKGRFTISRDDSKSSVYLQMNSLRAEDTGIYYCTRLANWDWYFDVWGAGTTVTVSS

SEQ ID NO: 22983 - protein, 5 aa, Artificial Sequence
  Description of Artificial Sequence: Synthetic peptide
  XENP020458 vhCDR1
HAWMD

SEQ ID NO: 22984 - protein, 19 aa, Artificial Sequence
  Description of Artificial Sequence: Synthetic peptide
  XENP020458 vhCDR2
EIRTKANNHATYYAESVKG

SEQ ID NO: 22985 - protein, 10 aa, Artificial Sequence
  Description of Artificial Sequence: Synthetic peptide
  XENP020458 vhCDR3
LANWDWYFDV

SEQ ID NO: 22986 - protein, 218 aa, Artificial Sequence; identical to SEQ ID NO: 22266
  Description of Artificial Sequence: Synthetic polypeptide
  XENP020458 7G8_H0.10_L0_IgG1_PVA_/S267K Light Chain

SEQ ID NO: 22987 - protein, 111 aa, Artificial Sequence; identical to SEQ ID NO: 22267
  Description of Artificial Sequence: Synthetic polypeptide
  VL of XENP020458

SEQ ID NO: 22988 - protein, 15 aa, Artificial Sequence
  Description of Artificial Sequence: Synthetic peptide
  XENP020458 vlCDR1
KASQSVDYDGDSYMN

SEQ ID NO: 22989 - protein, 7 aa, Artificial Sequence
  Description of Artificial Sequence: Synthetic peptide
  XENP020458 vlCDR2
AASNLES

SEQ ID NO: 22990 - protein, 9 aa, Artificial Sequence
  Description of Artificial Sequence: Synthetic peptide
  XENP020458 vlCDR3
QQSNEDPFT

SEQ ID NO: 22991 - protein, 450 aa, Artificial Sequence
  Description of Artificial Sequence: Synthetic polypeptide
  XENP020459 7G8_H0.11_L0_IgG1_PVA_/S267K Heavy Chain
EVKLEESGGGLVQPGGSMKLSCAASGFTFSSAWMDWVRQSPEKGLEWVAEIRTKANNHATYYAESVKGRFTISRDDSKSSVYLQMNSLRAEDTGIYYCTRLANWDWYFDVWGAGTTVTVSSASTKGPSVFPLAPSSKSTSGGTAALGCLVKDYFPEPVTVSWNSGALTSGVHTFPAVLQSSGLYSLSSVVTVPSSSLGTQTYICNVNHKPSDTKVDKKVEPKSCDKTHTCPPCPAPPVAGPSVFLFPPKPKDTLMISRTPEVTCVVVDVKHEDPEVKFNWYVDGVEVHNAKTKPREEEYNSTYRVVSVLTVLHQDWLNGKEYKCKVSNKALPAPIEKTISKAKGQPREPQVYTLPPSREEMTKNQVSLTCDVSGFYPSDIAVEWESDGQPENNYKTTPPVLDSDGSFFLYSKLTVDKSRWEQGDVFSCSVMHEALHNHYTQKSLSLSPGK

SEQ ID NO: 22992 - protein, 121 aa, Artificial Sequence
  Description of Artificial Sequence: Synthetic polypeptide
  VH of XENP020459
EVKLEESGGGLVQPGGSMKLSCAASGFTFSSAWMDWVRQSPEKGLEWVAEIRTKANNHATYYAESVKGRFTISRDDSKSSVYLQMNSLRAEDTGIYYCTRLANWDWYFDVWGAGTTVTVSS

SEQ ID NO: 22993 - protein, 5 aa, Artificial Sequence
  Description of Artificial Sequence: Synthetic peptide
  XENP020459 vhCDR1
SAWMD

SEQ ID NO: 22994 - protein, 19 aa, Artificial Sequence
  Description of Artificial Sequence: Synthetic peptide
  XENP020459 vhCDR2
EIRTKANNHATYYAESVKG

SEQ ID NO: 22995 - protein, 10 aa, Artificial Sequence
  Description of Artificial Sequence: Synthetic peptide
  XENP020459 vhCDR3
LANWDWYFDV

SEQ ID NO: 22996 - protein, 218 aa, Artificial Sequence; identical to SEQ ID NO: 22266
  Description of Artificial Sequence: Synthetic polypeptide
  XENP020459 7G8_H0.11_L0_IgG1_PVA_/S267K Light Chain

SEQ ID NO: 22997 - protein, 111 aa, Artificial Sequence; identical to SEQ ID NO: 22267
  Description of Artificial Sequence: Synthetic polypeptide
  VL of XENP020459

SEQ ID NO: 22998 - protein, 15 aa, Artificial Sequence
  Description of Artificial Sequence: Synthetic peptide
  XENP020459 vlCDR1
KASQSVDYDGDSYMN

SEQ ID NO: 22999 - protein, 7 aa, Artificial Sequence
  Description of Artificial Sequence: Synthetic peptide
  XENP020459 vlCDR2
AASNLES

SEQ ID NO: 23000 - protein, 9 aa, Artificial Sequence
  Description of Artificial Sequence: Synthetic peptide
  XENP020459 vlCDR3
QQSNEDPFT

SEQ ID NO: 23001 - protein, 450 aa, Artificial Sequence
  Description of Artificial Sequence: Synthetic polypeptide
  XENP020460 7G8_H0.12_L0_IgG1_PVA_/S267K Heavy Chain
EVKLEESGGGLVQPGGSMKLSCAASGFTFSRAWMDWVRQSPEKGLEWVAEIRTKANNHATYYAESVKGRFTISRDDSKSSVYLQMNSLRAEDTGIYYCTRLANWDWYFDVWGAGTTVTVSSASTKGPSVFPLAPSSKSTSGGTAALGCLVKDYFPEPVTVSWNSGALTSGVHTFPAVLQSSGLYSLSSVVTVPSSSLGTQTYICNVNHKPSDTKVDKKVEPKSCDKTHTCPPCPAPPVAGPSVFLFPPKPKDTLMISRTPEVTCVVVDVKHEDPEVKFNWYVDGVEVHNAKTKPREEEYNSTYRVVSVLTVLHQDWLNGKEYKCKVSNKALPAPIEKTISKAKGQPREPQVYTLPPSREEMTKNQVSLTCDVSGFYPSDIAVEWESDGQPENNYKTTPPVLDSDGSFFLYSKLTVDKSRWEQGDVFSCSVMHEALHNHYTQKSLSLSPGK

SEQ ID NO: 23002 - protein, 121 aa, Artificial Sequence
  Description of Artificial Sequence: Synthetic polypeptide
  VH of XENP020460
EVKLEESGGGLVQPGGSMKLSCAASGFTFSRAWMDWVRQSPEKGLEWVAEIRTKANNHATYYAESVKGRFTISRDDSKSSVYLQMNSLRAEDTGIYYCTRLANWDWYFDVWGAGTTVTVSS

SEQ ID NO: 23003 - protein, 5 aa, Artificial Sequence
  Description of Artificial Sequence: Synthetic peptide
  XENP020460 vhCDR1
RAWMD

SEQ ID NO: 23004 - protein, 19 aa, Artificial Sequence
  Description of Artificial Sequence: Synthetic peptide
  XENP020460 vhCDR2
EIRTKANNHATYYAESVKG

SEQ ID NO: 23005 - protein, 10 aa, Artificial Sequence
  Description of Artificial Sequence: Synthetic peptide
  XENP020460 vhCDR3
LANWDWYFDV

SEQ ID NO: 23006 - protein, 218 aa, Artificial Sequence; identical to SEQ ID NO: 22266
  Description of Artificial Sequence: Synthetic polypeptide
  XENP020460 7G8_H0.12_L0_IgG1_PVA_/S267K Light Chain

SEQ ID NO: 23007 - protein, 111 aa, Artificial Sequence; identical to SEQ ID NO: 22267
  Description of Artificial Sequence: Synthetic polypeptide
  VL of XENP020460

SEQ ID NO: 23008 - protein, 15 aa, Artificial Sequence
  Description of Artificial Sequence: Synthetic peptide
  XENP020460 vlCDR1
KASQSVDYDGDSYMN

SEQ ID NO: 23009 - protein, 7 aa, Artificial Sequence
  Description of Artificial Sequence: Synthetic peptide
  XENP020460 vlCDR2
AASNLES

SEQ ID NO: 23010 - protein, 9 aa, Artificial Sequence
  Description of Artificial Sequence: Synthetic peptide
  XENP020460 vlCDR3
QQSNEDPFT

SEQ ID NO: 23011 - protein, 450 aa, Artificial Sequence
  Description of Artificial Sequence: Synthetic polypeptide
  XENP020461 7G8_H0.13_L0_IgG1_PVA_/S267K Heavy Chain
EVKLEESGGGLVQPGGSMKLSCAASGFTFSLAWMDWVRQSPEKGLEWVAEIRTKANNHATYYAESVKGRFTISRDDSKSSVYLQMNSLRAEDTGIYYCTRLANWDWYFDVWGAGTTVTVSSASTKGPSVFPLAPSSKSTSGGTAALGCLVKDYFPEPVTVSWNSGALTSGVHTFPAVLQSSGLYSLSSVVTVPSSSLGTQTYICNVNHKPSDTKVDKKVEPKSCDKTHTCPPCPAPPVAGPSVFLFPPKPKDTLMISRTPEVTCVVVDVKHEDPEVKFNWYVDGVEVHNAKTKPREEEYNSTYRVVSVLTVLHQDWLNGKEYKCKVSNKALPAPIEKTISKAKGQPREPQVYTLPPSREEMTKNQVSLTCDVSGFYPSDIAVEWESDGQPENNYKTTPPVLDSDGSFFLYSKLTVDKSRWEQGDVFSCSVMHEALHNHYTQKSLSLSPGK

SEQ ID NO: 23012 - protein, 121 aa, Artificial Sequence
  Description of Artificial Sequence: Synthetic polypeptide
  VH of XENP020461
EVKLEESGGGLVQPGGSMKLSCAASGFTFSLAWMDWVRQSPEKGLEWVAEIRTKANNHATYYAESVKGRFTISRDDSKSSVYLQMNSLRAEDTGIYYCTRLANWDWYFDVWGAGTTVTVSS

SEQ ID NO: 23013 - protein, 5 aa, Artificial Sequence
  Description of Artificial Sequence: Synthetic peptide
  XENP020461 vhCDR1
LAWMD

SEQ ID NO: 23014 - protein, 19 aa, Artificial Sequence
  Description of Artificial Sequence: Synthetic peptide
  XENP020461 vhCDR2
EIRTKANNHATYYAESVKG

SEQ ID NO: 23015 - protein, 10 aa, Artificial Sequence
  Description of Artificial Sequence: Synthetic peptide
  XENP020461 vhCDR3
LANWDWYFDV

SEQ ID NO: 23016 - protein, 218 aa, Artificial Sequence; identical to SEQ ID NO: 22266
  Description of Artificial Sequence: Synthetic polypeptide
  XENP020461 7G8_H0.13_L0_IgG1_PVA_/S267K Light Chain

SEQ ID NO: 23017 - protein, 111 aa, Artificial Sequence; identical to SEQ ID NO: 22267
  Description of Artificial Sequence: Synthetic polypeptide
  VL of XENP020461

SEQ ID NO: 23018 - protein, 15 aa, Artificial Sequence
  Description of Artificial Sequence: Synthetic peptide
  XENP020461 vlCDR1
KASQSVDYDGDSYMN

SEQ ID NO: 23019 - protein, 7 aa, Artificial Sequence
  Description of Artificial Sequence: Synthetic peptide
  XENP020461 vlCDR2
AASNLES

SEQ ID NO: 23020 - protein, 9 aa, Artificial Sequence
  Description of Artificial Sequence: Synthetic peptide
  XENP020461 vlCDR3
QQSNEDPFT

SEQ ID NO: 23021 - protein, 450 aa, Artificial Sequence
  Description of Artificial Sequence: Synthetic polypeptide
  XENP020462 7G8_H0.14_L0_IgG1_PVA_/S267K Heavy Chain
EVKLEESGGGLVQPGGSMKLSCAASGFTFSTAWMDWVRQSPEKGLEWVAEIRTKANNHATYYAESVKGRFTISRDDSKSSVYLQMNSLRAEDTGIYYCTRLANWDWYFDVWGAGTTVTVSSASTKGPSVFPLAPSSKSTSGGTAALGCLVKDYFPEPVTVSWNSGALTSGVHTFPAVLQSSGLYSLSSVVTVPSSSLGTQTYICNVNHKPSDTKVDKKVEPKSCDKTHTCPPCPAPPVAGPSVFLFPPKPKDTLMISRTPEVTCVVVDVKHEDPEVKFNWYVDGVEVHNAKTKPREEEYNSTYRVVSVLTVLHQDWLNGKEYKCKVSNKALPAPIEKTISKAKGQPREPQVYTLPPSREEMTKNQVSLTCDVSGFYPSDIAVEWESDGQPENNYKTTPPVLDSDGSFFLYSKLTVDKSRWEQGDVFSCSVMHEALHNHYTQKSLSLSPGK

SEQ ID NO: 23022 - protein, 121 aa, Artificial Sequence
  Description of Artificial Sequence: Synthetic polypeptide
  VH of XENP020462
EVKLEESGGGLVQPGGSMKLSCAASGFTFSTAWMDWVRQSPEKGLEWVAEIRTKANNHATYYAESVKGRFTISRDDSKSSVYLQMNSLRAEDTGIYYCTRLANWDWYFDVWGAGTTVTVSS

SEQ ID NO: 23023 - protein, 5 aa, Artificial Sequence
  Description of Artificial Sequence: Synthetic peptide
  XENP020462 vhCDR1
TAWMD

SEQ ID NO: 23024 - protein, 19 aa, Artificial Sequence
  Description of Artificial Sequence: Synthetic peptide
  XENP020462 vhCDR2
EIRTKANNHATYYAESVKG

SEQ ID NO: 23025 - protein, 10 aa, Artificial Sequence
  Description of Artificial Sequence: Synthetic peptide
  XENP020462 vhCDR3
LANWDWYFDV

SEQ ID NO: 23026 - protein, 218 aa, Artificial Sequence; identical to SEQ ID NO: 22266
  Description of Artificial Sequence: Synthetic polypeptide
  XENP020462 7G8_H0.14_L0_IgG1_PVA_/S267K Light Chain

SEQ ID NO: 23027 - protein, 111 aa, Artificial Sequence; identical to SEQ ID NO: 22267
  Description of Artificial Sequence: Synthetic polypeptide
  VL of XENP020462

SEQ ID NO: 23028 - protein, 15 aa, Artificial Sequence
  Description of Artificial Sequence: Synthetic peptide
  XENP020462 vlCDR1
KASQSVDYDGDSYMN

SEQ ID NO: 23029 - protein, 7 aa, Artificial Sequence
  Description of Artificial Sequence: Synthetic peptide
  XENP020462 vlCDR2
AASNLES

SEQ ID NO: 23030 - protein, 9 aa, Artificial Sequence
  Description of Artificial Sequence: Synthetic peptide
  XENP020462 vlCDR3
QQSNEDPFT

SEQ ID NO: 23031 - protein, 450 aa, Artificial Sequence
  Description of Artificial Sequence: Synthetic polypeptide
  XENP020463 7G8_H0.15_L0_IgG1_PVA_/S267K Heavy Chain
EVKLEESGGGLVQPGGSMKLSCAASGFTFSGAWMDWVRQSPEKGLEWVAEIRTKANNHATYYAESVKGRFTISRDDSKSSVYLQMNSLRAEDTGIYYCTRLANWDWYFDVWGAGTTVTVSSASTKGPSVFPLAPSSKSTSGGTAALGCLVKDYFPEPVTVSWNSGALTSGVHTFPAVLQSSGLYSLSSVVTVPSSSLGTQTYICNVNHKPSDTKVDKKVEPKSCDKTHTCPPCPAPPVAGPSVFLFPPKPKDTLMISRTPEVTCVVVDVKHEDPEVKFNWYVDGVEVHNAKTKPREEEYNSTYRVVSVLTVLHQDWLNGKEYKCKVSNKALPAPIEKTISKAKGQPREPQVYTLPPSREEMTKNQVSLTCDVSGFYPSDIAVEWESDGQPENNYKTTPPVLDSDGSFFLYSKLTVDKSRWEQGDVFSCSVMHEALHNHYTQKSLSLSPGK

SEQ ID NO: 23032 - protein, 121 aa, Artificial Sequence
  Description of Artificial Sequence: Synthetic polypeptide
  VH of XENP020463
EVKLEESGGGLVQPGGSMKLSCAASGFTFSGAWMDWVRQSPEKGLEWVAEIRTKANNHATYYAESVKGRFTISRDDSKSSVYLQMNSLRAEDTGIYYCTRLANWDWYFDVWGAGTTVTVSS

SEQ ID NO: 23033 - protein, 5 aa, Artificial Sequence
  Description of Artificial Sequence: Synthetic peptide
  XENP020463 vhCDR1
GAWMD

SEQ ID NO: 23034 - protein, 19 aa, Artificial Sequence
  Description of Artificial Sequence: Synthetic peptide
  XENP020463 vhCDR2
EIRTKANNHATYYAESVKG

SEQ ID NO: 23035 - protein, 10 aa, Artificial Sequence
  Description of Artificial Sequence: Synthetic peptide
  XENP020463 vhCDR3
LANWDWYFDV

SEQ ID NO: 23036 - protein, 218 aa, Artificial Sequence; identical to SEQ ID NO: 22266
  Description of Artificial Sequence: Synthetic polypeptide
  XENP020463 7G8_H0.15_L0_IgG1_PVA_/S267K Light Chain

SEQ ID NO: 23037 - protein, 111 aa, Artificial Sequence; identical to SEQ ID NO: 22267
  Description of Artificial Sequence: Synthetic polypeptide
  VL of XENP020463

SEQ ID NO: 23038 - protein, 15 aa, Artificial Sequence
  Description of Artificial Sequence: Synthetic peptide
  XENP020463 vlCDR1
KASQSVDYDGDSYMN

SEQ ID NO: 23039 - protein, 7 aa, Artificial Sequence
  Description of Artificial Sequence: Synthetic peptide
  XENP020463 vlCDR2
AASNLES

SEQ ID NO: 23040 - protein, 9 aa, Artificial Sequence
  Description of Artificial Sequence: Synthetic peptide
  XENP020463 vlCDR3
QQSNEDPFT

SEQ ID NO: 23041 - protein, 450 aa, Artificial Sequence
  Description of Artificial Sequence: Synthetic polypeptide
  XENP020464 7G8_H0.16_L0_IgG1_PVA_/S267K Heavy Chain
EVKLEESGGGLVQPGGSMKLSCAASGFTFSYAWMDWVRQSPEKGLEWVAEIRTKANNHATYYAESVKGRFTISRDDSKSSVYLQMNSLRAEDTGIYYCTRLANWDWYFDVWGAGTTVTVSSASTKGPSVFPLAPSSKSTSGGTAALGCLVKDYFPEPVTVSWNSGALTSGVHTFPAVLQSSGLYSLSSVVTVPSSSLGTQTYICNVNHKPSDTKVDKKVEPKSCDKTHTCPPCPAPPVAGPSVFLFPPKPKDTLMISRTPEVTCVVVDVKHEDPEVKFNWYVDGVEVHNAKTKPREEEYNSTYRVVSVLTVLHQDWLNGKEYKCKVSNKALPAPIEKTISKAKGQPREPQVYTLPPSREEMTKNQVSLTCDVSGFYPSDIAVEWESDGQPENNYKTTPPVLDSDGSFFLYSKLTVDKSRWEQGDVFSCSVMHEALHNHYTQKSLSLSPGK

SEQ ID NO: 23042 - protein, 121 aa, Artificial Sequence
  Description of Artificial Sequence: Synthetic polypeptide
  VH of XENP020464
EVKLEESGGGLVQPGGSMKLSCAASGFTFSYAWMDWVRQSPEKGLEWVAEIRTKANNHATYYAESVKGRFTISRDDSKSSVYLQMNSLRAEDTGIYYCTRLANWDWYFDVWGAGTTVTVSS

SEQ ID NO: 23043 - protein, 5 aa, Artificial Sequence
  Description of Artificial Sequence: Synthetic peptide
  XENP020464 vhCDR1
YAWMD

SEQ ID NO: 23044 - protein, 19 aa, Artificial Sequence
  Description of Artificial Sequence: Synthetic peptide
  XENP020464 vhCDR2
EIRTKANNHATYYAESVKG

SEQ ID NO: 23045 - protein, 10 aa, Artificial Sequence
  Description of Artificial Sequence: Synthetic peptide
  XENP020464 vhCDR3
LANWDWYFDV

SEQ ID NO: 23046 - protein, 218 aa, Artificial Sequence; identical to SEQ ID NO: 22266
  Description of Artificial Sequence: Synthetic polypeptide
  XENP020464 7G8_H0.16_L0_IgG1_PVA_/S267K Light Chain

SEQ ID NO: 23047 - protein, 111 aa, Artificial Sequence; identical to SEQ ID NO: 22267
  Description of Artificial Sequence: Synthetic polypeptide
  VL of XENP020464

SEQ ID NO: 23048 - protein, 15 aa, Artificial Sequence
  Description of Artificial Sequence: Synthetic peptide
  XENP020464 vlCDR1
KASQSVDYDGDSYMN

SEQ ID NO: 23049 - protein, 7 aa, Artificial Sequence
  Description of Artificial Sequence: Synthetic peptide
  XENP020464 vlCDR2
AASNLES

SEQ ID NO: 23050 - protein, 9 aa, Artificial Sequence
  Description of Artificial Sequence: Synthetic peptide
  XENP020464 vlCDR3
QQSNEDPFT

SEQ ID NO: 23051 - protein, 450 aa, Artificial Sequence
  Description of Artificial Sequence: Synthetic polypeptide
  XENP020465 7G8_H0.17_L0_IgG1_PVA_/S267K Heavy Chain
EVKLEESGGGLVQPGGSMKLSCAASGFTFSDSWMDWVRQSPEKGLEWVAEIRTKANNHATYYAESVKGRFTISRDDSKSSVYLQMNSLRAEDTGIYYCTRLANWDWYFDVWGAGTTVTVSSASTKGPSVFPLAPSSKSTSGGTAALGCLVKDYFPEPVTVSWNSGALTSGVHTFPAVLQSSGLYSLSSVVTVPSSSLGTQTYICNVNHKPSDTKVDKKVEPKSCDKTHTCPPCPAPPVAGPSVFLFPPKPKDTLMISRTPEVTCVVVDVKHEDPEVKFNWYVDGVEVHNAKTKPREEEYNSTYRVVSVLTVLHQDWLNGKEYKCKVSNKALPAPIEKTISKAKGQPREPQVYTLPPSREEMTKNQVSLTCDVSGFYPSDIAVEWESDGQPENNYKTTPPVLDSDGSFFLYSKLTVDKSRWEQGDVFSCSVMHEALHNHYTQKSLSLSPGK

SEQ ID NO: 23052 - protein, 121 aa, Artificial Sequence
  Description of Artificial Sequence: Synthetic polypeptide
  VH of XENP020465
EVKLEESGGGLVQPGGSMKLSCAASGFTFSDSWMDWVRQSPEKGLEWVAEIRTKANNHATYYAESVKGRFTISRDDSKSSVYLQMNSLRAEDTGIYYCTRLANWDWYFDVWGAGTTVTVSS

SEQ ID NO: 23053 - protein, 5 aa, Artificial Sequence
  Description of Artificial Sequence: Synthetic peptide
  XENP020465 vhCDR1
DSWMD

SEQ ID NO: 23054 - protein, 19 aa, Artificial Sequence
  Description of Artificial Sequence: Synthetic peptide
  XENP020465 vhCDR2
EIRTKANNHATYYAESVKG

SEQ ID NO: 23055 - protein, 10 aa, Artificial Sequence
  Description of Artificial Sequence: Synthetic peptide
  XENP020465 vhCDR3
LANWDWYFDV

SEQ ID NO: 23056 - protein, 218 aa, Artificial Sequence; identical to SEQ ID NO: 22266
  Description of Artificial Sequence: Synthetic polypeptide
  XENP020465 7G8_H0.17_L0_IgG1_PVA_/S267K Light Chain

SEQ ID NO: 23057 - protein, 111 aa, Artificial Sequence; identical to SEQ ID NO: 22267
  Description of Artificial Sequence: Synthetic polypeptide
  VL of XENP020465

SEQ ID NO: 23058 - protein, 15 aa, Artificial Sequence
  Description of Artificial Sequence: Synthetic peptide
  XENP020465 vlCDR1
KASQSVDYDGDSYMN

SEQ ID NO: 23059 - protein, 7 aa, Artificial Sequence
  Description of Artificial Sequence: Synthetic peptide
  XENP020465 vlCDR2
AASNLES

SEQ ID NO: 23060 - protein, 9 aa, Artificial Sequence
  Description of Artificial Sequence: Synthetic peptide
  XENP020465 vlCDR3
QQSNEDPFT

SEQ ID NO: 23061 - protein, 450 aa, Artificial Sequence
  Description of Artificial Sequence: Synthetic polypeptide
  XENP020466 7G8_H0.18_L0_IgG1_PVA_/S267K Heavy Chain
EVKLEESGGGLVQPGGSMKLSCAASGFTFSDTWMDWVRQSPEKGLEWVAEIRTKANNHATYYAESVKGRFTISRDDSKSSVYLQMNSLRAEDTGIYYCTRLANWDWYFDVWGAGTTVTVSSASTKGPSVFPLAPSSKSTSGGTAALGCLVKDYFPEPVTVSWNSGALTSGVHTFPAVLQSSGLYSLSSVVTVPSSSLGTQTYICNVNHKPSDTKVDKKVEPKSCDKTHTCPPCPAPPVAGPSVFLFPPKPKDTLMISRTPEVTCVVVDVKHEDPEVKFNWYVDGVEVHNAKTKPREEEYNSTYRVVSVLTVLHQDWLNGKEYKCKVSNKALPAPIEKTISKAKGQPREPQVYTLPPSREEMTKNQVSLTCDVSGFYPSDIAVEWESDGQPENNYKTTPPVLDSDGSFFLYSKLTVDKSRWEQGDVFSCSVMHEALHNHYTQKSLSLSPGK

SEQ ID NO: 23062 - protein, 121 aa, Artificial Sequence
  Description of Artificial Sequence: Synthetic polypeptide
  VH of XENP020466
EVKLEESGGGLVQPGGSMKLSCAASGFTFSDTWMDWVRQSPEKGLEWVAEIRTKANNHATYYAESVKGRFTISRDDSKSSVYLQMNSLRAEDTGIYYCTRLANWDWYFDVWGAGTTVTVSS

SEQ ID NO: 23063 - protein, 5 aa, Artificial Sequence
  Description of Artificial Sequence: Synthetic peptide
  XENP020466 vhCDR1
DTWMD

SEQ ID NO: 23064 - protein, 19 aa, Artificial Sequence
  Description of Artificial Sequence: Synthetic peptide
  XENP020466 vhCDR2
EIRTKANNHATYYAESVKG

SEQ ID NO: 23065 - protein, 10 aa, Artificial Sequence
  Description of Artificial Sequence: Synthetic peptide
  XENP020466 vhCDR3
LANWDWYFDV

SEQ ID NO: 23066 - protein, 218 aa, Artificial Sequence; identical to SEQ ID NO: 22266
  Description of Artificial Sequence: Synthetic polypeptide
  XENP020466 7G8_H0.18_L0_IgG1_PVA_/S267K Light Chain

SEQ ID NO: 23067 - protein, 111 aa, Artificial Sequence; identical to SEQ ID NO: 22267
  Description of Artificial Sequence: Synthetic polypeptide
  VL of XENP020466

SEQ ID NO: 23068 - protein, 15 aa, Artificial Sequence
  Description of Artificial Sequence: Synthetic peptide
  XENP020466 vlCDR1
KASQSVDYDGDSYMN

SEQ ID NO: 23069 - protein, 7 aa, Artificial Sequence
  Description of Artificial Sequence: Synthetic peptide
  XENP020466 vlCDR2
AASNLES

SEQ ID NO: 23070 - protein, 9 aa, Artificial Sequence
  Description of Artificial Sequence: Synthetic peptide
  XENP020466 vlCDR3
QQSNEDPFT

SEQ ID NO: 23071 - protein, 450 aa, Artificial Sequence
  Description of Artificial Sequence: Synthetic polypeptide
  XENP020467 7G8_H0.19_L0_IgG1_PVA_/S267K Heavy Chain
EVKLEESGGGLVQPGGSMKLSCAASGFTFSDGWMDWVRQSPEKGLEWVAEIRTKANNHATYYAESVKGRFTISRDDSKSSVYLQMNSLRAEDTGIYYCTRLANWDWYFDVWGAGTTVTVSSASTKGPSVFPLAPSSKSTSGGTAALGCLVKDYFPEPVTVSWNSGALTSGVHTFPAVLQSSGLYSLSSVVTVPSSSLGTQTYICNVNHKPSDTKVDKKVEPKSCDKTHTCPPCPAPPVAGPSVFLFPPKPKDTLMISRTPEVTCVVVDVKHEDPEVKFNWYVDGVEVHNAKTKPREEEYNSTYRVVSVLTVLHQDWLNGKEYKCKVSNKALPAPIEKTISKAKGQPREPQVYTLPPSREEMTKNQVSLTCDVSGFYPSDIAVEWESDGQPENNYKTTPPVLDSDGSFFLYSKLTVDKSRWEQGDVFSCSVMHEALHNHYTQKSLSLSPGK

SEQ ID NO: 23072 - protein, 121 aa, Artificial Sequence
  Description of Artificial Sequence: Synthetic polypeptide
  VH of XENP020467
EVKLEESGGGLVQPGGSMKLSCAASGFTFSDGWMDWVRQSPEKGLEWVAEIRTKANNHATYYAESVKGRFTISRDDSKSSVYLQMNSLRAEDTGIYYCTRLANWDWYFDVWGAGTTVTVSS

SEQ ID NO: 23073 - protein, 5 aa, Artificial Sequence
  Description of Artificial Sequence: Synthetic peptide
  XENP020467 vhCDR1
DGWMD

SEQ ID NO: 23074 - protein, 19 aa, Artificial Sequence
  Description of Artificial Sequence: Synthetic peptide
  XENP020467 vhCDR2
EIRTKANNHATYYAESVKG

SEQ ID NO: 23075 - protein, 10 aa, Artificial Sequence
  Description of Artificial Sequence: Synthetic peptide
  XENP020467 vhCDR3
LANWDWYFDV

SEQ ID NO: 23076 - protein, 218 aa, Artificial Sequence; identical to SEQ ID NO: 22266
  Description of Artificial Sequence: Synthetic polypeptide
  XENP020467 7G8_H0.19_L0_IgG1_PVA_/S267K Light Chain

SEQ ID NO: 23077 - protein, 111 aa, Artificial Sequence; identical to SEQ ID NO: 22267
  Description of Artificial Sequence: Synthetic polypeptide
  VL of XENP020467

SEQ ID NO: 23078 - protein, 15 aa, Artificial Sequence
  Description of Artificial Sequence: Synthetic peptide
  XENP020467 vlCDR1
KASQSVDYDGDSYMN

SEQ ID NO: 23079 - protein, 7 aa, Artificial Sequence
  Description of Artificial Sequence: Synthetic peptide
  XENP020467 vlCDR2
AASNLES

SEQ ID NO: 23080 - protein, 9 aa, Artificial Sequence
  Description of Artificial Sequence: Synthetic peptide
  XENP020467 vlCDR3
QQSNEDPFT

SEQ ID NO: 23081 - protein, 450 aa, Artificial Sequence
  Description of Artificial Sequence: Synthetic polypeptide
  XENP020468 7G8_H0.20_L0_IgG1_PVA_/S267K Heavy Chain
EVKLEESGGGLVQPGGSMKLSCAASGFTFSDHWMDWVRQSPEKGLEWVAEIRTKANNHATYYAESVKGRFTISRDDSKSSVYLQMNSLRAEDTGIYYCTRLANWDWYFDVWGAGTTVTVSSASTKGPSVFPLAPSSKSTSGGTAALGCLVKDYFPEPVTVSWNSGALTSGVHTFPAVLQSSGLYSLSSVVTVPSSSLGTQTYICNVNHKPSDTKVDKKVEPKSCDKTHTCPPCPAPPVAGPSVFLFPPKPKDTLMISRTPEVTCVVVDVKHEDPEVKFNWYVDGVEVHNAKTKPREEEYNSTYRVVSVLTVLHQDWLNGKEYKCKVSNKALPAPIEKTISKAKGQPREPQVYTLPPSREEMTKNQVSLTCDVSGFYPSDIAVEWESDGQPENNYKTTPPVLDSDGSFFLYSKLTVDKSRWEQGDVFSCSVMHEALHNHYTQKSLSLSPGK

SEQ ID NO: 23082 - protein, 121 aa, Artificial Sequence
  Description of Artificial Sequence: Synthetic polypeptide
  VH of XENP020468
EVKLEESGGGLVQPGGSMKLSCAASGFTFSDHWMDWVRQSPEKGLEWVAEIRTKANNHATYYAESVKGRFTISRDDSKSSVYLQMNSLRAEDTGIYYCTRLANWDWYFDVWGAGTTVTVSS

SEQ ID NO: 23083 - protein, 5 aa, Artificial Sequence
  Description of Artificial Sequence: Synthetic peptide
  XENP020468 vhCDR1
DHWMD

SEQ ID NO: 23084 - protein, 19 aa, Artificial Sequence
  Description of Artificial Sequence: Synthetic peptide
  XENP020468 vhCDR2
EIRTKANNHATYYAESVKG

SEQ ID NO: 23085 - protein, 10 aa, Artificial Sequence
  Description of Artificial Sequence: Synthetic peptide
  XENP020468 vhCDR3
LANWDWYFDV

SEQ ID NO: 23086 - protein, 218 aa, Artificial Sequence; identical to SEQ ID NO: 22266
  Description of Artificial Sequence: Synthetic polypeptide
  XENP020468 7G8_H0.20_L0_IgG1_PVA_/S267K Light Chain

SEQ ID NO: 23087 - protein, 111 aa, Artificial Sequence; identical to SEQ ID NO: 22267
  Description of Artificial Sequence: Synthetic polypeptide
  VL of XENP020468

SEQ ID NO: 23088 - protein, 15 aa, Artificial Sequence
  Description of Artificial Sequence: Synthetic peptide
  XENP020468 vlCDR1
KASQSVDYDGDSYMN

SEQ ID NO: 23089 - protein, 7 aa, Artificial Sequence
  Description of Artificial Sequence: Synthetic peptide
  XENP020468 vlCDR2
AASNLES

SEQ ID NO: 23090 - protein, 9 aa, Artificial Sequence
  Description of Artificial Sequence: Synthetic peptide
  XENP020468 vlCDR3
QQSNEDPFT

SEQ ID NO: 23091 - protein, 450 aa, Artificial Sequence
  Description of Artificial Sequence: Synthetic polypeptide
  XENP020469 7G8_H0.21_L0_IgG1_PVA_/S267K Heavy Chain
EVKLEESGGGLVQPGGSMKLSCAASGFTFSDDWMDWVRQSPEKGLEWVAEIRTKANNHATYYAESVKGRFTISRDDSKSSVYLQMNSLRAEDTGIYYCTRLANWDWYFDVWGAGTTVTVSSASTKGPSVFPLAPSSKSTSGGTAALGCLVKDYFPEPVTVSWNSGALTSGVHTFPAVLQSSGLYSLSSVVTVPSSSLGTQTYICNVNHKPSDTKVDKKVEPKSCDKTHTCPPCPAPPVAGPSVFLFPPKPKDTLMISRTPEVTCVVVDVKHEDPEVKFNWYVDGVEVHNAKTKPREEEYNSTYRVVSVLTVLHQDWLNGKEYKCKVSNKALPAPIEKTISKAKGQPREPQVYTLPPSREEMTKNQVSLTCDVSGFYPSDIAVEWESDGQPENNYKTTPPVLDSDGSFFLYSKLTVDKSRWEQGDVFSCSVMHEALHNHYTQKSLSLSPGK

SEQ ID NO: 23092 - protein, 121 aa, Artificial Sequence
  Description of Artificial Sequence: Synthetic polypeptide
  VH of XENP020469
EVKLEESGGGLVQPGGSMKLSCAASGFTFSDDWMDWVRQSPEKGLEWVAEIRTKANNHATYYAESVKGRFTISRDDSKSSVYLQMNSLRAEDTGIYYCTRLANWDWYFDVWGAGTTVTVSS

SEQ ID NO: 23093 - protein, 5 aa, Artificial Sequence
  Description of Artificial Sequence: Synthetic peptide
  XENP020469 vhCDR1
DDWMD

SEQ ID NO: 23094 - protein, 19 aa, Artificial Sequence
  Description of Artificial Sequence: Synthetic peptide
  XENP020469 vhCDR2
EIRTKANNHATYYAESVKG

SEQ ID NO: 23095 - protein, 10 aa, Artificial Sequence
  Description of Artificial Sequence: Synthetic peptide
  XENP020469 vhCDR3
LANWDWYFDV

SEQ ID NO: 23096 - protein, 218 aa, Artificial Sequence; identical to SEQ ID NO: 22266
  Description of Artificial Sequence: Synthetic polypeptide
  XENP020469 7G8_H0.21_L0_IgG1_PVA_/S267K Light Chain

SEQ ID NO: 23097 - protein, 111 aa, Artificial Sequence; identical to SEQ ID NO: 22267
  Description of Artificial Sequence: Synthetic polypeptide
  VL of XENP020469

SEQ ID NO: 23098 - protein, 15 aa, Artificial Sequence
  Description of Artificial Sequence: Synthetic peptide
  XENP020469 vlCDR1
KASQSVDYDGDSYMN

SEQ ID NO: 23099 - protein, 7 aa, Artificial Sequence
  Description of Artificial Sequence: Synthetic peptide
  XENP020469 vlCDR2
AASNLES

SEQ ID NO: 23100 - protein, 9 aa, Artificial Sequence
  Description of Artificial Sequence: Synthetic peptide
  XENP020469 vlCDR3
QQSNEDPFT

SEQ ID NO: 23101 - protein, 450 aa, Artificial Sequence
  Description of Artificial Sequence: Synthetic polypeptide
  XENP020470 7G8_H0.22_L0_IgG1_PVA_/S267K Heavy Chain
EVKLEESGGGLVQPGGSMKLSCAASGFTFSDLWMDWVRQSPEKGLEWVAEIRTKANNHATYYAESVKGRFTISRDDSKSSVYLQMNSLRAEDTGIYYCTRLANWDWYFDVWGAGTTVTVSSASTKGPSVFPLAPSSKSTSGGTAALGCLVKDYFPEPVTVSWNSGALTSGVHTFPAVLQSSGLYSLSSVVTVPSSSLGTQTYICNVNHKPSDTKVDKKVEPKSCDKTHTCPPCPAPPVAGPSVFLFPPKPKDTLMISRTPEVTCVVVDVKHEDPEVKFNWYVDGVEVHNAKTKPREEEYNSTYRVVSVLTVLHQDWLNGKEYKCKVSNKALPAPIEKTISKAKGQPREPQVYTLPPSREEMTKNQVSLTCDVSGFYPSDIAVEWESDGQPENNYKTTPPVLDSDGSFFLYSKLTVDKSRWEQGDVFSCSVMHEALHNHYTQKSLSLSPGK

SEQ ID NO: 23102 - protein, 121 aa, Artificial Sequence
  Description of Artificial Sequence: Synthetic polypeptide
  VH of XENP020470
EVKLEESGGGLVQPGGSMKLSCAASGFTFSDLWMDWVRQSPEKGLEWVAEIRTKANNHATYYAESVKGRFTISRDDSKSSVYLQMNSLRAEDTGIYYCTRLANWDWYFDVWGAGTTVTVSS

SEQ ID NO: 23103 - protein, 5 aa, Artificial Sequence
  Description of Artificial Sequence: Synthetic peptide
  XENP020470 vhCDR1
DLWMD

SEQ ID NO: 23104 - protein, 19 aa, Artificial Sequence
  Description of Artificial Sequence: Synthetic peptide
  XENP020470 vhCDR2
EIRTKANNHATYYAESVKG

SEQ ID NO: 23105 - protein, 10 aa, Artificial Sequence
  Description of Artificial Sequence: Synthetic peptide
  XENP020470 vhCDR3
LANWDWYFDV

SEQ ID NO: 23106 - protein, 218 aa, Artificial Sequence; identical to SEQ ID NO: 22266
  Description of Artificial Sequence: Synthetic polypeptide
  XENP020470 7G8_H0.22_L0_IgG1_PVA_/S267K Light Chain

SEQ ID NO: 23107 - protein, 111 aa, Artificial Sequence; identical to SEQ ID NO: 22267
  Description of Artificial Sequence: Synthetic polypeptide
  VL of XENP020470

SEQ ID NO: 23108 - protein, 15 aa, Artificial Sequence
  Description of Artificial Sequence: Synthetic peptide
  XENP020470 vlCDR1
KASQSVDYDGDSYMN

SEQ ID NO: 23109 - protein, 7 aa, Artificial Sequence
  Description of Artificial Sequence: Synthetic peptide
  XENP020470 vlCDR2
AASNLES

SEQ ID NO: 23110 - protein, 9 aa, Artificial Sequence
  Description of Artificial Sequence: Synthetic peptide
  XENP020470 vlCDR3
QQSNEDPFT

SEQ ID NO: 23111 - protein, 450 aa, Artificial Sequence
  Description of Artificial Sequence: Synthetic polypeptide
  XENP020471 7G8_H0.23_L0_IgG1_PVA_/S267K Heavy Chain
EVKLEESGGGLVQPGGSMKLSCAASGFTFSDKWMDWVRQSPEKGLEWVAEIRTKANNHATYYAESVKGRFTISRDDSKSSVYLQMNSLRAEDTGIYYCTRLANWDWYFDVWGAGTTVTVSSASTKGPSVFPLAPSSKSTSGGTAALGCLVKDYFPEPVTVSWNSGALTSGVHTFPAVLQSSGLYSLSSVVTVPSSSLGTQTYICNVNHKPSDTKVDKKVEPKSCDKTHTCPPCPAPPVAGPSVFLFPPKPKDTLMISRTPEVTCVVVDVKHEDPEVKFNWYVDGVEVHNAKTKPREEEYNSTYRVVSVLTVLHQDWLNGKEYKCKVSNKALPAPIEKTISKAKGQPREPQVYTLPPSREEMTKNQVSLTCDVSGFYPSDIAVEWESDGQPENNYKTTPPVLDSDGSFFLYSKLTVDKSRWEQGDVFSCSVMHEALHNHYTQKSLSLSPGK

SEQ ID NO: 23112 - protein, 121 aa, Artificial Sequence
  Description of Artificial Sequence: Synthetic polypeptide
  VH of XENP020471
EVKLEESGGGLVQPGGSMKLSCAASGFTFSDKWMDWVRQSPEKGLEWVAEIRTKANNHATYYAESVKGRFTISRDDSKSSVYLQMNSLRAEDTGIYYCTRLANWDWYFDVWGAGTTVTVSS

SEQ ID NO: 23113 - protein, 5 aa, Artificial Sequence
  Description of Artificial Sequence: Synthetic peptide
  XENP020471 vhCDR1
DKWMD

SEQ ID NO: 23114 - protein, 19 aa, Artificial Sequence
  Description of Artificial Sequence: Synthetic peptide
  XENP020471 vhCDR2
EIRTKANNHATYYAESVKG

SEQ ID NO: 23115 - protein, 10 aa, Artificial Sequence
  Description of Artificial Sequence: Synthetic peptide
  XENP020471 vhCDR3
LANWDWYFDV

SEQ ID NO: 23116 - protein, 218 aa, Artificial Sequence; identical to SEQ ID NO: 22266
  Description of Artificial Sequence: Synthetic polypeptide
  XENP020471 7G8_H0.23_L0_IgG1_PVA_/S267K Light Chain

SEQ ID NO: 23117 - protein, 111 aa, Artificial Sequence; identical to SEQ ID NO: 22267
  Description of Artificial Sequence: Synthetic polypeptide
  VL of XENP020471

SEQ ID NO: 23118 - protein, 15 aa, Artificial Sequence
  Description of Artificial Sequence: Synthetic peptide
  XENP020471 vlCDR1
KASQSVDYDGDSYMN

SEQ ID NO: 23119 - protein, 7 aa, Artificial Sequence
  Description of Artificial Sequence: Synthetic peptide
  XENP020471 vlCDR2
AASNLES

SEQ ID NO: 23120 - protein, 9 aa, Artificial Sequence
  Description of Artificial Sequence: Synthetic peptide
  XENP020471 vlCDR3
QQSNEDPFT

SEQ ID NO: 23121 - protein, 450 aa, Artificial Sequence
  Description of Artificial Sequence: Synthetic polypeptide
  XENP020472 7G8_H0.24_L0_IgG1_PVA_/S267K Heavy Chain
EVKLEESGGGLVQPGGSMKLSCAASGFTFSDYWMDWVRQSPEKGLEWVAEIRTKANNHATYYAESVKGRFTISRDDSKSSVYLQMNSLRAEDTGIYYCTRLANWDWYFDVWGAGTTVTVSSASTKGPSVFPLAPSSKSTSGGTAALGCLVKDYFPEPVTVSWNSGALTSGVHTFPAVLQSSGLYSLSSVVTVPSSSLGTQTYICNVNHKPSDTKVDKKVEPKSCDKTHTCPPCPAPPVAGPSVFLFPPKPKDTLMISRTPEVTCVVVDVKHEDPEVKFNWYVDGVEVHNAKTKPREEEYNSTYRVVSVLTVLHQDWLNGKEYKCKVSNKALPAPIEKTISKAKGQPREPQVYTLPPSREEMTKNQVSLTCDVSGFYPSDIAVEWESDGQPENNYKTTPPVLDSDGSFFLYSKLTVDKSRWEQGDVFSCSVMHEALHNHYTQKSLSLSPGK

SEQ ID NO: 23122 - protein, 121 aa, Artificial Sequence
  Description of Artificial Sequence: Synthetic polypeptide
  VH of XENP020472
EVKLEESGGGLVQPGGSMKLSCAASGFTFSDYWMDWVRQSPEKGLEWVAEIRTKANNHATYYAESVKGRFTISRDDSKSSVYLQMNSLRAEDTGIYYCTRLANWDWYFDVWGAGTTVTVSS

SEQ ID NO: 23123 - protein, 5 aa, Artificial Sequence
  Description of Artificial Sequence: Synthetic peptide
  XENP020472 vhCDR1
DYWMD

SEQ ID NO: 23124 - protein, 19 aa, Artificial Sequence
  Description of Artificial Sequence: Synthetic peptide
  XENP020472 vhCDR2
EIRTKANNHATYYAESVKG

SEQ ID NO: 23125 - protein, 10 aa, Artificial Sequence
  Description of Artificial Sequence: Synthetic peptide
  XENP020472 vhCDR3
LANWDWYFDV

SEQ ID NO: 23126 - protein, 218 aa, Artificial Sequence; identical to SEQ ID NO: 22266
  Description of Artificial Sequence: Synthetic polypeptide
  XENP020472 7G8_H0.24_L0_IgG1_PVA_/S267K Light Chain

SEQ ID NO: 23127 - protein, 111 aa, Artificial Sequence; identical to SEQ ID NO: 22267
  Description of Artificial Sequence: Synthetic polypeptide
  VL of XENP020472

SEQ ID NO: 23128 - protein, 15 aa, Artificial Sequence
  Description of Artificial Sequence: Synthetic peptide
  XENP020472 vlCDR1
KASQSVDYDGDSYMN

SEQ ID NO: 23129 - protein, 7 aa, Artificial Sequence
  Description of Artificial Sequence: Synthetic peptide
  XENP020472 vlCDR2
AASNLES

SEQ ID NO: 23130 - protein, 9 aa, Artificial Sequence
  Description of Artificial Sequence: Synthetic peptide
  XENP020472 vlCDR3
QQSNEDPFT

SEQ ID NO: 23131 - protein, 450 aa, Artificial Sequence
  Description of Artificial Sequence: Synthetic polypeptide
  XENP020473 7G8_H0.25_L0_IgG1_PVA_/S267K Heavy Chain
EVKLEESGGGLVQPGGSMKLSCAASGFTFSDAYMDWVRQSPEKGLEWVAEIRTKANNHATYYAESVKGRFTISRDDSKSSVYLQMNSLRAEDTGIYYCTRLANWDWYFDVWGAGTTVTVSSASTKGPSVFPLAPSSKSTSGGTAALGCLVKDYFPEPVTVSWNSGALTSGVHTFPAVLQSSGLYSLSSVVTVPSSSLGTQTYICNVNHKPSDTKVDKKVEPKSCDKTHTCPPCPAPPVAGPSVFLFPPKPKDTLMISRTPEVTCVVVDVKHEDPEVKFNWYVDGVEVHNAKTKPREEEYNSTYRVVSVLTVLHQDWLNGKEYKCKVSNKALPAPIEKTISKAKGQPREPQVYTLPPSREEMTKNQVSLTCDVSGFYPSDIAVEWESDGQPENNYKTTPPVLDSDGSFFLYSKLTVDKSRWEQGDVFSCSVMHEALHNHYTQKSLSLSPGK

SEQ ID NO: 23132 - protein, 121 aa, Artificial Sequence
  Description of Artificial Sequence: Synthetic polypeptide
  VH of XENP020473
EVKLEESGGGLVQPGGSMKLSCAASGFTFSDAYMDWVRQSPEKGLEWVAEIRTKANNHATYYAESVKGRFTISRDDSKSSVYLQMNSLRAEDTGIYYCTRLANWDWYFDVWGAGTTVTVSS

SEQ ID NO: 23133 - protein, 5 aa, Artificial Sequence
  Description of Artificial Sequence: Synthetic peptide
  XENP020473 vhCDR1
DAYMD

SEQ ID NO: 23134 - protein, 19 aa, Artificial Sequence
  Description of Artificial Sequence: Synthetic peptide
  XENP020473 vhCDR2
EIRTKANNHATYYAESVKG

SEQ ID NO: 23135 - protein, 10 aa, Artificial Sequence
  Description of Artificial Sequence: Synthetic peptide
  XENP020473 vhCDR3
LANWDWYFDV

SEQ ID NO: 23136 - protein, 218 aa, Artificial Sequence; identical to SEQ ID NO: 22266
  Description of Artificial Sequence: Synthetic polypeptide
  XENP020473 7G8_H0.25_L0_IgG1_PVA_/S267K Light Chain

SEQ ID NO: 23137 - protein, 111 aa, Artificial Sequence; identical to SEQ ID NO: 22267
  Description of Artificial Sequence: Synthetic polypeptide
  VL of XENP020473

SEQ ID NO: 23138 - protein, 15 aa, Artificial Sequence
  Description of Artificial Sequence: Synthetic peptide
  XENP020473 vlCDR1
KASQSVDYDGDSYMN

SEQ ID NO: 23139 - protein, 7 aa, Artificial Sequence
  Description of Artificial Sequence: Synthetic peptide
  XENP020473 vlCDR2
AASNLES

SEQ ID NO: 23140 - protein, 9 aa, Artificial Sequence
  Description of Artificial Sequence: Synthetic peptide
  XENP020473 vlCDR3
QQSNEDPFT

SEQ ID NO: 23141 - protein, 450 aa, Artificial Sequence
  Description of Artificial Sequence: Synthetic polypeptide
  XENP020474 7G8_H0.26_L0_IgG1_PVA_/S267K Heavy Chain
EVKLEESGGGLVQPGGSMKLSCAASGFTFSDAFMDWVRQSPEKGLEWVAEIRTKANNHATYYAESVKGRFTISRDDSKSSVYLQMNSLRAEDTGIYYCTRLANWDWYFDVWGAGTTVTVSSASTKGPSVFPLAPSSKSTSGGTAALGCLVKDYFPEPVTVSWNSGALTSGVHTFPAVLQSSGLYSLSSVVTVPSSSLGTQTYICNVNHKPSDTKVDKKVEPKSCDKTHTCPPCPAPPVAGPSVFLFPPKPKDTLMISRTPEVTCVVVDVKHEDPEVKFNWYVDGVEVHNAKTKPREEEYNSTYRVVSVLTVLHQDWLNGKEYKCKVSNKALPAPIEKTISKAKGQPREPQVYTLPPSREEMTKNQVSLTCDVSGFYPSDIAVEWESDGQPENNYKTTPPVLDSDGSFFLYSKLTVDKSRWEQGDVFSCSVMHEALHNHYTQKSLSLSPGK

SEQ ID NO: 23142 - protein, 121 aa, Artificial Sequence
  Description of Artificial Sequence: Synthetic polypeptide
  VH of XENP020474
EVKLEESGGGLVQPGGSMKLSCAASGFTFSDAFMDWVRQSPEKGLEWVAEIRTKANNHATYYAESVKGRFTISRDDSKSSVYLQMNSLRAEDTGIYYCTRLANWDWYFDVWGAGTTVTVSS

SEQ ID NO: 23143 - protein, 5 aa, Artificial Sequence
  Description of Artificial Sequence: Synthetic peptide
  XENP020474 vhCDR1
DAFMD

SEQ ID NO: 23144 - protein, 19 aa, Artificial Sequence
  Description of Artificial Sequence: Synthetic peptide
  XENP020474 vhCDR2
EIRTKANNHATYYAESVKG

SEQ ID NO: 23145 - protein, 10 aa, Artificial Sequence
  Description of Artificial Sequence: Synthetic peptide
  XENP020474 vhCDR3
LANWDWYFDV

SEQ ID NO: 23146 - protein, 218 aa, Artificial Sequence; identical to SEQ ID NO: 22266
  Description of Artificial Sequence: Synthetic polypeptide
  XENP020474 7G8_H0.26_L0_IgG1_PVA_/S267K Light Chain

SEQ ID NO: 23147 - protein, 111 aa, Artificial Sequence; identical to SEQ ID NO: 22267
  Description of Artificial Sequence: Synthetic polypeptide
  VL of XENP020474

SEQ ID NO: 23148 - protein, 15 aa, Artificial Sequence
  Description of Artificial Sequence: Synthetic peptide
  XENP020474 vlCDR1
KASQSVDYDGDSYMN

SEQ ID NO: 23149 - protein, 7 aa, Artificial Sequence
  Description of Artificial Sequence: Synthetic peptide
  XENP020474 vlCDR2
AASNLES

SEQ ID NO: 23150 - protein, 9 aa, Artificial Sequence
  Description of Artificial Sequence: Synthetic peptide
  XENP020474 vlCDR3
QQSNEDPFT

SEQ ID NO: 23151 - protein, 450 aa, Artificial Sequence
  Description of Artificial Sequence: Synthetic polypeptide
  XENP020475 7G8_H0.27_L0_IgG1_PVA_/S267K Heavy Chain
EVKLEESGGGLVQPGGSMKLSCAASGFTFSDAWMDWVRQSPEKGLEWVAEIKTKANNHATYYAESVKGRFTISRDDSKSSVYLQMNSLRAEDTGIYYCTRLANWDWYFDVWGAGTTVTVSSASTKGPSVFPLAPSSKSTSGGTAALGCLVKDYFPEPVTVSWNSGALTSGVHTFPAVLQSSGLYSLSSVVTVPSSSLGTQTYICNVNHKPSDTKVDKKVEPKSCDKTHTCPPCPAPPVAGPSVFLFPPKPKDTLMISRTPEVTCVVVDVKHEDPEVKFNWYVDGVEVHNAKTKPREEEYNSTYRVVSVLTVLHQDWLNGKEYKCKVSNKALPAPIEKTISKAKGQPREPQVYTLPPSREEMTKNQVSLTCDVSGFYPSDIAVEWESDGQPENNYKTTPPVLDSDGSFFLYSKLTVDKSRWEQGDVFSCSVMHEALHNHYTQKSLSLSPGK

SEQ ID NO: 23152 - protein, 121 aa, Artificial Sequence
  Description of Artificial Sequence: Synthetic polypeptide
  VH of XENP020475
EVKLEESGGGLVQPGGSMKLSCAASGFTFSDAWMDWVRQSPEKGLEWVAEIKTKANNHATYYAESVKGRFTISRDDSKSSVYLQMNSLRAEDTGIYYCTRLANWDWYFDVWGAGTTVTVSS

SEQ ID NO: 23153 - protein, 5 aa, Artificial Sequence
  Description of Artificial Sequence: Synthetic peptide
  XENP020475 vhCDR1
DAWMD

SEQ ID NO: 23154 - protein, 19 aa, Artificial Sequence
  Description of Artificial Sequence: Synthetic peptide
  XENP020475 vhCDR2
EIKTKANNHATYYAESVKG

SEQ ID NO: 23155 - protein, 10 aa, Artificial Sequence
  Description of Artificial Sequence: Synthetic peptide
  XENP020475 vhCDR3
LANWDWYFDV

SEQ ID NO: 23156 - protein, 218 aa, Artificial Sequence; identical to SEQ ID NO: 22266
  Description of Artificial Sequence: Synthetic polypeptide
  XENP020475 7G8_H0.27_L0_IgG1_PVA_/S267K Light Chain

SEQ ID NO: 23157 - protein, 111 aa, Artificial Sequence; identical to SEQ ID NO: 22267
  Description of Artificial Sequence: Synthetic polypeptide
  VL of XENP020475

SEQ ID NO: 23158 - protein, 15 aa, Artificial Sequence
  Description of Artificial Sequence: Synthetic peptide
  XENP020475 vlCDR1
KASQSVDYDGDSYMN

SEQ ID NO: 23159 - protein, 7 aa, Artificial Sequence
  Description of Artificial Sequence: Synthetic peptide
  XENP020475 vlCDR2
AASNLES

SEQ ID NO: 23160 - protein, 9 aa, Artificial Sequence
  Description of Artificial Sequence: Synthetic peptide
  XENP020475 vlCDR3
QQSNEDPFT

SEQ ID NO: 23161 - protein, 450 aa, Artificial Sequence
  Description of Artificial Sequence: Synthetic polypeptide
  XENP020476 7G8_H0.28_L0_IgG1_PVA_/S267K Heavy Chain
EVKLEESGGGLVQPGGSMKLSCAASGFTFSDAWMDWVRQSPEKGLEWVAEIETKANNHATYYAESVKGRFTISRDDSKSSVYLQMNSLRAEDTGIYYCTRLANWDWYFDVWGAGTTVTVSSASTKGPSVFPLAPSSKSTSGGTAALGCLVKDYFPEPVTVSWNSGALTSGVHTFPAVLQSSGLYSLSSVVTVPSSSLGTQTYICNVNHKPSDTKVDKKVEPKSCDKTHTCPPCPAPPVAGPSVFLFPPKPKDTLMISRTPEVTCVVVDVKHEDPEVKFNWYVDGVEVHNAKTKPREEEYNSTYRVVSVLTVLHQDWLNGKEYKCKVSNKALPAPIEKTISKAKGQPREPQVYTLPPSREEMTKNQVSLTCDVSGFYPSDIAVEWESDGQPENNYKTTPPVLDSDGSFFLYSKLTVDKSRWEQGDVFSCSVMHEALHNHYTQKSLSLSPGK

SEQ ID NO: 23162 - protein, 121 aa, Artificial Sequence
  Description of Artificial Sequence: Synthetic polypeptide
  VH of XENP020476
EVKLEESGGGLVQPGGSMKLSCAASGFTFSDAWMDWVRQSPEKGLEWVAEIETKANNHATYYAESVKGRFTISRDDSKSSVYLQMNSLRAEDTGIYYCTRLANWDWYFDVWGAGTTVTVSS

SEQ ID NO: 23163 - protein, 5 aa, Artificial Sequence
  Description of Artificial Sequence: Synthetic peptide
  XENP020476 vhCDR1
DAWMD

SEQ ID NO: 23164 - protein, 19 aa, Artificial Sequence
  Description of Artificial Sequence: Synthetic peptide
  XENP020476 vhCDR2
EIETKANNHATYYAESVKG

SEQ ID NO: 23165 - protein, 10 aa, Artificial Sequence
  Description of Artificial Sequence: Synthetic peptide
  XENP020476 vhCDR3
LANWDWYFDV

SEQ ID NO: 23166 - protein, 218 aa, Artificial Sequence; identical to SEQ ID NO: 22266
  Description of Artificial Sequence: Synthetic polypeptide
  XENP020476 7G8_H0.28_L0_IgG1_PVA_/S267K Light Chain

SEQ ID NO: 23167 - protein, 111 aa, Artificial Sequence; identical to SEQ ID NO: 22267
  Description of Artificial Sequence: Synthetic polypeptide
  VL of XENP020476

SEQ ID NO: 23168 - protein, 15 aa, Artificial Sequence
  Description of Artificial Sequence: Synthetic peptide
  XENP020476 vlCDR1
KASQSVDYDGDSYMN

SEQ ID NO: 23169 - protein, 7 aa, Artificial Sequence
  Description of Artificial Sequence: Synthetic peptide
  XENP020476 vlCDR2
AASNLES

SEQ ID NO: 23170 - protein, 9 aa, Artificial Sequence
  Description of Artificial Sequence: Synthetic peptide
  XENP020476 vlCDR3
QQSNEDPFT

SEQ ID NO: 23171 - protein, 450 aa, Artificial Sequence
  Description of Artificial Sequence: Synthetic polypeptide
  XENP020477 7G8_H0.29_L0_IgG1_PVA_/S267K Heavy Chain
EVKLEESGGGLVQPGGSMKLSCAASGFTFSDAWMDWVRQSPEKGLEWVAEIDTKANNHATYYAESVKGRFTISRDDSKSSVYLQMNSLRAEDTGIYYCTRLANWDWYFDVWGAGTTVTVSSASTKGPSVFPLAPSSKSTSGGTAALGCLVKDYFPEPVTVSWNSGALTSGVHTFPAVLQSSGLYSLSSVVTVPSSSLGTQTYICNVNHKPSDTKVDKKVEPKSCDKTHTCPPCPAPPVAGPSVFLFPPKPKDTLMISRTPEVTCVVVDVKHEDPEVKFNWYVDGVEVHNAKTKPREEEYNSTYRVVSVLTVLHQDWLNGKEYKCKVSNKALPAPIEKTISKAKGQPREPQVYTLPPSREEMTKNQVSLTCDVSGFYPSDIAVEWESDGQPENNYKTTPPVLDSDGSFFLYSKLTVDKSRWEQGDVFSCSVMHEALHNHYTQKSLSLSPGK

SEQ ID NO: 23172 - protein, 121 aa, Artificial Sequence
  Description of Artificial Sequence: Synthetic polypeptide
  VH of XENP020477
EVKLEESGGGLVQPGGSMKLSCAASGFTFSDAWMDWVRQSPEKGLEWVAEIDTKANNHATYYAESVKGRFTISRDDSKSSVYLQMNSLRAEDTGIYYCTRLANWDWYFDVWGAGTTVTVSS

SEQ ID NO: 23173 - protein, 5 aa, Artificial Sequence
  Description of Artificial Sequence: Synthetic peptide
  XENP020477 vhCDR1
DAWMD

SEQ ID NO: 23174 - protein, 19 aa, Artificial Sequence
  Description of Artificial Sequence: Synthetic peptide
  XENP020477 vhCDR2
EIDTKANNHATYYAESVKG

SEQ ID NO: 23175 - protein, 10 aa, Artificial Sequence
  Description of Artificial Sequence: Synthetic peptide
  XENP020477 vhCDR3
LANWDWYFDV

SEQ ID NO: 23176 - protein, 218 aa, Artificial Sequence; identical to SEQ ID NO: 22266
  Description of Artificial Sequence: Synthetic polypeptide
  XENP020477 7G8_H0.29_L0_IgG1_PVA_/S267K Light Chain

SEQ ID NO: 23177 - protein, 111 aa, Artificial Sequence; identical to SEQ ID NO: 22267
  Description of Artificial Sequence: Synthetic polypeptide
  VL of XENP020477

SEQ ID NO: 23178 - protein, 15 aa, Artificial Sequence
  Description of Artificial Sequence: Synthetic peptide
  XENP020477 vlCDR1
KASQSVDYDGDSYMN

SEQ ID NO: 23179 - protein, 7 aa, Artificial Sequence
  Description of Artificial Sequence: Synthetic peptide
  XENP020477 vlCDR2
AASNLES

SEQ ID NO: 23180 - protein, 9 aa, Artificial Sequence
  Description of Artificial Sequence: Synthetic peptide
  XENP020477 vlCDR3
QQSNEDPFT

SEQ ID NO: 23181 - protein, 450 aa, Artificial Sequence
  Description of Artificial Sequence: Synthetic polypeptide
  XENP020478 7G8_H0.30_L0_IgG1_PVA_/S267K Heavy Chain
EVKLEESGGGLVQPGGSMKLSCAASGFTFSDAWMDWVRQSPEKGLEWVAEIHTKANNHATYYAESVKGRFTISRDDSKSSVYLQMNSLRAEDTGIYYCTRLANWDWYFDVWGAGTTVTVSSASTKGPSVFPLAPSSKSTSGGTAALGCLVKDYFPEPVTVSWNSGALTSGVHTFPAVLQSSGLYSLSSVVTVPSSSLGTQTYICNVNHKPSDTKVDKKVEPKSCDKTHTCPPCPAPPVAGPSVFLFPPKPKDTLMISRTPEVTCVVVDVKHEDPEVKFNWYVDGVEVHNAKTKPREEEYNSTYRVVSVLTVLHQDWLNGKEYKCKVSNKALPAPIEKTISKAKGQPREPQVYTLPPSREEMTKNQVSLTCDVSGFYPSDIAVEWESDGQPENNYKTTPPVLDSDGSFFLYSKLTVDKSRWEQGDVFSCSVMHEALHNHYTQKSLSLSPGK

SEQ ID NO: 23182 - protein, 121 aa, Artificial Sequence
  Description of Artificial Sequence: Synthetic polypeptide
  VH of XENP020478
EVKLEESGGGLVQPGGSMKLSCAASGFTFSDAWMDWVRQSPEKGLEWVAEIHTKANNHATYYAESVKGRFTISRDDSKSSVYLQMNSLRAEDTGIYYCTRLANWDWYFDVWGAGTTVTVSS

SEQ ID NO: 23183 - protein, 5 aa, Artificial Sequence
  Description of Artificial Sequence: Synthetic peptide
  XENP020478 vhCDR1
DAWMD

SEQ ID NO: 23184 - protein, 19 aa, Artificial Sequence
  Description of Artificial Sequence: Synthetic peptide
  XENP020478 vhCDR2
EIHTKANNHATYYAESVKG

SEQ ID NO: 23185 - protein, 10 aa, Artificial Sequence
  Description of Artificial Sequence: Synthetic peptide
  XENP020478 vhCDR3
LANWDWYFDV

SEQ ID NO: 23186 - protein, 218 aa, Artificial Sequence; identical to SEQ ID NO: 22266
  Description of Artificial Sequence: Synthetic polypeptide
  XENP020478 7G8_H0.30_L0_IgG1_PVA_/S267K Light Chain

SEQ ID NO: 23187 - protein, 111 aa, Artificial Sequence; identical to SEQ ID NO: 22267
  Description of Artificial Sequence: Synthetic polypeptide
  VL of XENP020478

SEQ ID NO: 23188 - protein, 15 aa, Artificial Sequence
  Description of Artificial Sequence: Synthetic peptide
  XENP020478 vlCDR1
KASQSVDYDGDSYMN

SEQ ID NO: 23189 - protein, 7 aa, Artificial Sequence
  Description of Artificial Sequence: Synthetic peptide
  XENP020478 vlCDR2
AASNLES

SEQ ID NO: 23190 - protein, 9 aa, Artificial Sequence
  Description of Artificial Sequence: Synthetic peptide
  XENP020478 vlCDR3
QQSNEDPFT

SEQ ID NO: 23191 - protein, 450 aa, Artificial Sequence
  Description of Artificial Sequence: Synthetic polypeptide
  XENP020479 7G8_H0.31_L0_IgG1_PVA_/S267K Heavy Chain
EVKLEESGGGLVQPGGSMKLSCAASGFTFSDAWMDWVRQSPEKGLEWVAEISTKANNHATYYAESVKGRFTISRDDSKSSVYLQMNSLRAEDTGIYYCTRLANWDWYFDVWGAGTTVTVSSASTKGPSVFPLAPSSKSTSGGTAALGCLVKDYFPEPVTVSWNSGALTSGVHTFPAVLQSSGLYSLSSVVTVPSSSLGTQTYICNVNHKPSDTKVDKKVEPKSCDKTHTCPPCPAPPVAGPSVFLFPPKPKDTLMISRTPEVTCVVVDVKHEDPEVKFNWYVDGVEVHNAKTKPREEEYNSTYRVVSVLTVLHQDWLNGKEYKCKVSNKALPAPIEKTISKAKGQPREPQVYTLPPSREEMTKNQVSLTCDVSGFYPSDIAVEWESDGQPENNYKTTPPVLDSDGSFFLYSKLTVDKSRWEQGDVFSCSVMHEALHNHYTQKSLSLSPGK

SEQ ID NO: 23192 - protein, 121 aa, Artificial Sequence
  Description of Artificial Sequence: Synthetic polypeptide
  VH of XENP020479
EVKLEESGGGLVQPGGSMKLSCAASGFTFSDAWMDWVRQSPEKGLEWVAEISTKANNHATYYAESVKGRFTISRDDSKSSVYLQMNSLRAEDTGIYYCTRLANWDWYFDVWGAGTTVTVSS

SEQ ID NO: 23193 - protein, 5 aa, Artificial Sequence
  Description of Artificial Sequence: Synthetic peptide
  XENP020479 vhCDR1
DAWMD

SEQ ID NO: 23194 - protein, 19 aa, Artificial Sequence
  Description of Artificial Sequence: Synthetic peptide
  XENP020479 vhCDR2
EISTKANNHATYYAESVKG

SEQ ID NO: 23195 - protein, 10 aa, Artificial Sequence
  Description of Artificial Sequence: Synthetic peptide
  XENP020479 vhCDR3
LANWDWYFDV

SEQ ID NO: 23196 - protein, 218 aa, Artificial Sequence; identical to SEQ ID NO: 22266
  Description of Artificial Sequence: Synthetic polypeptide
  XENP020479 7G8_H0.31_L0_IgG1_PVA_/S267K Light Chain

SEQ ID NO: 23197 - protein, 111 aa, Artificial Sequence; identical to SEQ ID NO: 22267
  Description of Artificial Sequence: Synthetic polypeptide
  VL of XENP020479

SEQ ID NO: 23198 - protein, 15 aa, Artificial Sequence
  Description of Artificial Sequence: Synthetic peptide
  XENP020479 vlCDR1
KASQSVDYDGDSYMN

SEQ ID NO: 23199 - protein, 7 aa, Artificial Sequence
  Description of Artificial Sequence: Synthetic peptide
  XENP020479 vlCDR2
AASNLES

SEQ ID NO: 23200 - protein, 9 aa, Artificial Sequence
  Description of Artificial Sequence: Synthetic peptide
  XENP020479 vlCDR3
QQSNEDPFT

SEQ ID NO: 23201 - protein, 450 aa, Artificial Sequence
  Description of Artificial Sequence: Synthetic polypeptide
  XENP020480 7G8_H0.32_L0_IgG1_PVA_/S267K Heavy Chain
EVKLEESGGGLVQPGGSMKLSCAASGFTFSDAWMDWVRQSPEKGLEWVAEIGTKANNHATYYAESVKGRFTISRDDSKSSVYLQMNSLRAEDTGIYYCTRLANWDWYFDVWGAGTTVTVSSASTKGPSVFPLAPSSKSTSGGTAALGCLVKDYFPEPVTVSWNSGALTSGVHTFPAVLQSSGLYSLSSVVTVPSSSLGTQTYICNVNHKPSDTKVDKKVEPKSCDKTHTCPPCPAPPVAGPSVFLFPPKPKDTLMISRTPEVTCVVVDVKHEDPEVKFNWYVDGVEVHNAKTKPREEEYNSTYRVVSVLTVLHQDWLNGKEYKCKVSNKALPAPIEKTISKAKGQPREPQVYTLPPSREEMTKNQVSLTCDVSGFYPSDIAVEWESDGQPENNYKTTPPVLDSDGSFFLYSKLTVDKSRWEQGDVFSCSVMHEALHNHYTQKSLSLSPGK

SEQ ID NO: 23202 - protein, 121 aa, Artificial Sequence
  Description of Artificial Sequence: Synthetic polypeptide
  VH of XENP020480
EVKLEESGGGLVQPGGSMKLSCAASGFTFSDAWMDWVRQSPEKGLEWVAEIGTKANNHATYYAESVKGRFTISRDDSKSSVYLQMNSLRAEDTGIYYCTRLANWDWYFDVWGAGTTVTVSS

SEQ ID NO: 23203 - protein, 5 aa, Artificial Sequence
  Description of Artificial Sequence: Synthetic peptide
  XENP020480 vhCDR1
DAWMD

SEQ ID NO: 23204 - protein, 19 aa, Artificial Sequence
  Description of Artificial Sequence: Synthetic peptide
  XENP020480 vhCDR2
EIGTKANNHATYYAESVKG

SEQ ID NO: 23205 - protein, 10 aa, Artificial Sequence
  Description of Artificial Sequence: Synthetic peptide
  XENP020480 vhCDR3
LANWDWYFDV

SEQ ID NO: 23206 - protein, 218 aa, Artificial Sequence; identical to SEQ ID NO: 22266
  Description of Artificial Sequence: Synthetic polypeptide
  XENP020480 7G8_H0.32_L0_IgG1_PVA_/S267K Light Chain

SEQ ID NO: 23207 - protein, 111 aa, Artificial Sequence; identical to SEQ ID NO: 22267
  Description of Artificial Sequence: Synthetic polypeptide
  VL of XENP020480

SEQ ID NO: 23208 - protein, 15 aa, Artificial Sequence
  Description of Artificial Sequence: Synthetic peptide
  XENP020480 vlCDR1
KASQSVDYDGDSYMN

SEQ ID NO: 23209 - protein, 7 aa, Artificial Sequence
  Description of Artificial Sequence: Synthetic peptide
  XENP020480 vlCDR2
AASNLES

SEQ ID NO: 23210 - protein, 9 aa, Artificial Sequence
  Description of Artificial Sequence: Synthetic peptide
  XENP020480 vlCDR3
QQSNEDPFT

SEQ ID NO: 23211 - protein, 450 aa, Artificial Sequence
  Description of Artificial Sequence: Synthetic polypeptide
  XENP020481 7G8_H0.33_L0_IgG1_PVA_/S267K Heavy Chain
EVKLEESGGGLVQPGGSMKLSCAASGFTFSDAWMDWVRQSPEKGLEWVAEIYTKANNHATYYAESVKGRFTISRDDSKSSVYLQMNSLRAEDTGIYYCTRLANWDWYFDVWGAGTTVTVSSASTKGPSVFPLAPSSKSTSGGTAALGCLVKDYFPEPVTVSWNSGALTSGVHTFPAVLQSSGLYSLSSVVTVPSSSLGTQTYICNVNHKPSDTKVDKKVEPKSCDKTHTCPPCPAPPVAGPSVFLFPPKPKDTLMISRTPEVTCVVVDVKHEDPEVKFNWYVDGVEVHNAKTKPREEEYNSTYRVVSVLTVLHQDWLNGKEYKCKVSNKALPAPIEKTISKAKGQPREPQVYTLPPSREEMTKNQVSLTCDVSGFYPSDIAVEWESDGQPENNYKTTPPVLDSDGSFFLYSKLTVDKSRWEQGDVFSCSVMHEALHNHYTQKSLSLSPGK

SEQ ID NO: 23212 - protein, 121 aa, Artificial Sequence
  Description of Artificial Sequence: Synthetic polypeptide
  VH of XENP020481
EVKLEESGGGLVQPGGSMKLSCAASGFTFSDAWMDWVRQSPEKGLEWVAEIYTKANNHATYYAESVKGRFTISRDDSKSSVYLQMNSLRAEDTGIYYCTRLANWDWYFDVWGAGTTVTVSS

SEQ ID NO: 23213 - protein, 5 aa, Artificial Sequence
  Description of Artificial Sequence: Synthetic peptide
  XENP020481 vhCDR1
DAWMD

SEQ ID NO: 23214 - protein, 19 aa, Artificial Sequence
  Description of Artificial Sequence: Synthetic peptide
  XENP020481 vhCDR2
EIYTKANNHATYYAESVKG

SEQ ID NO: 23215 - protein, 10 aa, Artificial Sequence
  Description of Artificial Sequence: Synthetic peptide
  XENP020481 vhCDR3
LANWDWYFDV

SEQ ID NO: 23216 - protein, 218 aa, Artificial Sequence; identical to SEQ ID NO: 22266
  Description of Artificial Sequence: Synthetic polypeptide
  XENP020481 7G8_H0.33_L0_IgG1_PVA_/S267K Light Chain

SEQ ID NO: 23217 - protein, 111 aa, Artificial Sequence; identical to SEQ ID NO: 22267
  Description of Artificial Sequence: Synthetic polypeptide
  VL of XENP020481

SEQ ID NO: 23218 - protein, 15 aa, Artificial Sequence
  Description of Artificial Sequence: Synthetic peptide
  XENP020481 vlCDR1
KASQSVDYDGDSYMN

SEQ ID NO: 23219 - protein, 7 aa, Artificial Sequence
  Description of Artificial Sequence: Synthetic peptide
  XENP020481 vlCDR2
AASNLES

SEQ ID NO: 23220 - protein, 9 aa, Artificial Sequence
  Description of Artificial Sequence: Synthetic peptide
  XENP020481 vlCDR3
QQSNEDPFT

SEQ ID NO: 23221 - protein, 450 aa, Artificial Sequence
  Description of Artificial Sequence: Synthetic polypeptide
  XENP020482 7G8_H0.34_L0_IgG1_PVA_/S267K Heavy Chain
EVKLEESGGGLVQPGGSMKLSCAASGFTFSDAWMDWVRQSPEKGLEWVAEIITKANNHATYYAESVKGRFTISRDDSKSSVYLQMNSLRAEDTGIYYCTRLANWDWYFDVWGAGTTVTVSSASTKGPSVFPLAPSSKSTSGGTAALGCLVKDYFPEPVTVSWNSGALTSGVHTFPAVLQSSGLYSLSSVVTVPSSSLGTQTYICNVNHKPSDTKVDKKVEPKSCDKTHTCPPCPAPPVAGPSVFLFPPKPKDTLMISRTPEVTCVVVDVKHEDPEVKFNWYVDGVEVHNAKTKPREEEYNSTYRVVSVLTVLHQDWLNGKEYKCKVSNKALPAPIEKTISKAKGQPREPQVYTLPPSREEMTKNQVSLTCDVSGFYPSDIAVEWESDGQPENNYKTTPPVLDSDGSFFLYSKLTVDKSRWEQGDVFSCSVMHEALHNHYTQKSLSLSPGK

SEQ ID NO: 23222 - protein, 121 aa, Artificial Sequence
  Description of Artificial Sequence: Synthetic polypeptide
  VH of XENP020482
EVKLEESGGGLVQPGGSMKLSCAASGFTFSDAWMDWVRQSPEKGLEWVAEIITKANNHATYYAESVKGRFTISRDDSKSSVYLQMNSLRAEDTGIYYCTRLANWDWYFDVWGAGTTVTVSS

SEQ ID NO: 23223 - protein, 5 aa, Artificial Sequence
  Description of Artificial Sequence: Synthetic peptide
  XENP020482 vhCDR1
DAWMD

SEQ ID NO: 23224 - protein, 19 aa, Artificial Sequence
  Description of Artificial Sequence: Synthetic peptide
  XENP020482 vhCDR2
EIITKANNHATYYAESVKG

SEQ ID NO: 23225 - protein, 10 aa, Artificial Sequence
  Description of Artificial Sequence: Synthetic peptide
  XENP020482 vhCDR3
LANWDWYFDV

SEQ ID NO: 23226 - protein, 218 aa, Artificial Sequence; identical to SEQ ID NO: 22266
  Description of Artificial Sequence: Synthetic polypeptide
  XENP020482 7G8_H0.34_L0_IgG1_PVA_/S267K Light Chain

SEQ ID NO: 23227 - protein, 111 aa, Artificial Sequence; identical to SEQ ID NO: 22267
  Description of Artificial Sequence: Synthetic polypeptide
  VL of XENP020482

SEQ ID NO: 23228 - protein, 15 aa, Artificial Sequence
  Description of Artificial Sequence: Synthetic peptide
  XENP020482 vlCDR1
KASQSVDYDGDSYMN

SEQ ID NO: 23229 - protein, 7 aa, Artificial Sequence
  Description of Artificial Sequence: Synthetic peptide
  XENP020482 vlCDR2
AASNLES

SEQ ID NO: 23230 - protein, 9 aa, Artificial Sequence
  Description of Artificial Sequence: Synthetic peptide
  XENP020482 vlCDR3
QQSNEDPFT

SEQ ID NO: 23231 - protein, 450 aa, Artificial Sequence
  Description of Artificial Sequence: Synthetic polypeptide
  XENP020483 7G8_H0.35_L0_IgG1_PVA_/S267K Heavy Chain
EVKLEESGGGLVQPGGSMKLSCAASGFTFSDAWMDWVRQSPEKGLEWVAEIWTKANNHATYYAESVKGRFTISRDDSKSSVYLQMNSLRAEDTGIYYCTRLANWDWYFDVWGAGTTVTVSSASTKGPSVFPLAPSSKSTSGGTAALGCLVKDYFPEPVTVSWNSGALTSGVHTFPAVLQSSGLYSLSSVVTVPSSSLGTQTYICNVNHKPSDTKVDKKVEPKSCDKTHTCPPCPAPPVAGPSVFLFPPKPKDTLMISRTPEVTCVVVDVKHEDPEVKFNWYVDGVEVHNAKTKPREEEYNSTYRVVSVLTVLHQDWLNGKEYKCKVSNKALPAPIEKTISKAKGQPREPQVYTLPPSREEMTKNQVSLTCDVSGFYPSDIAVEWESDGQPENNYKTTPPVLDSDGSFFLYSKLTVDKSRWEQGDVFSCSVMHEALHNHYTQKSLSLSPGK

SEQ ID NO: 23232 - protein, 121 aa, Artificial Sequence
  Description of Artificial Sequence: Synthetic polypeptide
  VH of XENP020483
EVKLEESGGGLVQPGGSMKLSCAASGFTFSDAWMDWVRQSPEKGLEWVAEIWTKANNHATYYAESVKGRFTISRDDSKSSVYLQMNSLRAEDTGIYYCTRLANWDWYFDVWGAGTTVTVSS

SEQ ID NO: 23233 - protein, 5 aa, Artificial Sequence
  Description of Artificial Sequence: Synthetic peptide
  XENP020483 vhCDR1
DAWMD

SEQ ID NO: 23234 - protein, 19 aa, Artificial Sequence
  Description of Artificial Sequence: Synthetic peptide
  XENP020483 vhCDR2
EIWTKANNHATYYAESVKG

SEQ ID NO: 23235 - protein, 10 aa, Artificial Sequence
  Description of Artificial Sequence: Synthetic peptide
  XENP020483 vhCDR3
LANWDWYFDV

SEQ ID NO: 23236 - protein, 218 aa, Artificial Sequence; identical to SEQ ID NO: 22266
  Description of Artificial Sequence: Synthetic polypeptide
  XENP020483 7G8_H0.35_L0_IgG1_PVA_/S267K Light Chain

SEQ ID NO: 23237 - protein, 111 aa, Artificial Sequence; identical to SEQ ID NO: 22267
  Description of Artificial Sequence: Synthetic polypeptide
  VL of XENP020483

SEQ ID NO: 23238 - protein, 15 aa, Artificial Sequence
  Description of Artificial Sequence: Synthetic peptide
  XENP020483 vlCDR1
KASQSVDYDGDSYMN

SEQ ID NO: 23239 - protein, 7 aa, Artificial Sequence
  Description of Artificial Sequence: Synthetic peptide
  XENP020483 vlCDR2
AASNLES

SEQ ID NO: 23240 - protein, 9 aa, Artificial Sequence
  Description of Artificial Sequence: Synthetic peptide
  XENP020483 vlCDR3
QQSNEDPFT

SEQ ID NO: 23241 - protein, 450 aa, Artificial Sequence
  Description of Artificial Sequence: Synthetic polypeptide
  XENP020484 7G8_H0.36_L0_IgG1_PVA_/S267K Heavy Chain
EVKLEESGGGLVQPGGSMKLSCAASGFTFSDAWMDWVRQSPEKGLEWVAEIRVKANNHATYYAESVKGRFTISRDDSKSSVYLQMNSLRAEDTGIYYCTRLANWDWYFDVWGAGTTVTVSSASTKGPSVFPLAPSSKSTSGGTAALGCLVKDYFPEPVTVSWNSGALTSGVHTFPAVLQSSGLYSLSSVVTVPSSSLGTQTYICNVNHKPSDTKVDKKVEPKSCDKTHTCPPCPAPPVAGPSVFLFPPKPKDTLMISRTPEVTCVVVDVKHEDPEVKFNWYVDGVEVHNAKTKPREEEYNSTYRVVSVLTVLHQDWLNGKEYKCKVSNKALPAPIEKTISKAKGQPREPQVYTLPPSREEMTKNQVSLTCDVSGFYPSDIAVEWESDGQPENNYKTTPPVLDSDGSFFLYSKLTVDKSRWEQGDVFSCSVMHEALHNHYTQKSLSLSPGK

SEQ ID NO: 23242 - protein, 121 aa, Artificial Sequence
  Description of Artificial Sequence: Synthetic polypeptide
  VH of XENP020484
EVKLEESGGGLVQPGGSMKLSCAASGFTFSDAWMDWVRQSPEKGLEWVAEIRVKANNHATYYAESVKGRFTISRDDSKSSVYLQMNSLRAEDTGIYYCTRLANWDWYFDVWGAGTTVTVSS

SEQ ID NO: 23243 - protein, 5 aa, Artificial Sequence
  Description of Artificial Sequence: Synthetic peptide
  XENP020484 vhCDR1
DAWMD

SEQ ID NO: 23244 - protein, 19 aa, Artificial Sequence
  Description of Artificial Sequence: Synthetic peptide
  XENP020484 vhCDR2
EIRVKANNHATYYAESVKG

SEQ ID NO: 23245 - protein, 10 aa, Artificial Sequence
  Description of Artificial Sequence: Synthetic peptide
  XENP020484 vhCDR3
LANWDWYFDV

SEQ ID NO: 23246 - protein, 218 aa, Artificial Sequence; identical to SEQ ID NO: 22266
  Description of Artificial Sequence: Synthetic polypeptide
  XENP020484 7G8_H0.36_L0_IgG1_PVA_/S267K Light Chain

SEQ ID NO: 23247 - protein, 111 aa, Artificial Sequence; identical to SEQ ID NO: 22267
  Description of Artificial Sequence: Synthetic polypeptide
  VL of XENP020484

SEQ ID NO: 23248 - protein, 15 aa, Artificial Sequence
  Description of Artificial Sequence: Synthetic peptide
  XENP020484 vlCDR1
KASQSVDYDGDSYMN

SEQ ID NO: 23249 - protein, 7 aa, Artificial Sequence
  Description of Artificial Sequence: Synthetic peptide
  XENP020484 vlCDR2
AASNLES

SEQ ID NO: 23250 - protein, 9 aa, Artificial Sequence
  Description of Artificial Sequence: Synthetic peptide
  XENP020484 vlCDR3
QQSNEDPFT

SEQ ID NO: 23251 - protein, 450 aa, Artificial Sequence
  Description of Artificial Sequence: Synthetic polypeptide
  XENP020485 7G8_H0.37_L0_IgG1_PVA_/S267K Heavy Chain
EVKLEESGGGLVQPGGSMKLSCAASGFTFSDAWMDWVRQSPEKGLEWVAEIRSKANNHATYYAESVKGRFTISRDDSKSSVYLQMNSLRAEDTGIYYCTRLANWDWYFDVWGAGTTVTVSSASTKGPSVFPLAPSSKSTSGGTAALGCLVKDYFPEPVTVSWNSGALTSGVHTFPAVLQSSGLYSLSSVVTVPSSSLGTQTYICNVNHKPSDTKVDKKVEPKSCDKTHTCPPCPAPPVAGPSVFLFPPKPKDTLMISRTPEVTCVVVDVKHEDPEVKFNWYVDGVEVHNAKTKPREEEYNSTYRVVSVLTVLHQDWLNGKEYKCKVSNKALPAPIEKTISKAKGQPREPQVYTLPPSREEMTKNQVSLTCDVSGFYPSDIAVEWESDGQPENNYKTTPPVLDSDGSFFLYSKLTVDKSRWEQGDVFSCSVMHEALHNHYTQKSLSLSPGK

SEQ ID NO: 23252 - protein, 121 aa, Artificial Sequence
  Description of Artificial Sequence: Synthetic polypeptide
  VH of XENP020485
EVKLEESGGGLVQPGGSMKLSCAASGFTFSDAWMDWVRQSPEKGLEWVAEIRSKANNHATYYAESVKGRFTISRDDSKSSVYLQMNSLRAEDTGIYYCTRLANWDWYFDVWGAGTTVTVSS

SEQ ID NO: 23253 - protein, 5 aa, Artificial Sequence
  Description of Artificial Sequence: Synthetic peptide
  XENP020485 vhCDR1
DAWMD

SEQ ID NO: 23254 - protein, 19 aa, Artificial Sequence
  Description of Artificial Sequence: Synthetic peptide
  XENP020485 vhCDR2
EIRSKANNHATYYAESVKG

SEQ ID NO: 23255 - protein, 10 aa, Artificial Sequence
  Description of Artificial Sequence: Synthetic peptide
  XENP020485 vhCDR3
LANWDWYFDV

SEQ ID NO: 23256 - protein, 218 aa, Artificial Sequence; identical to SEQ ID NO: 22266
  Description of Artificial Sequence: Synthetic polypeptide
  XENP020485 7G8_H0.37_L0_IgG1_PVA_/S267K Light Chain

SEQ ID NO: 23257 - protein, 111 aa, Artificial Sequence; identical to SEQ ID NO: 22267
  Description of Artificial Sequence: Synthetic polypeptide
  VL of XENP020485

SEQ ID NO: 23258 - protein, 15 aa, Artificial Sequence
  Description of Artificial Sequence: Synthetic peptide
  XENP020485 vlCDR1
KASQSVDYDGDSYMN

SEQ ID NO: 23259 - protein, 7 aa, Artificial Sequence
  Description of Artificial Sequence: Synthetic peptide
  XENP020485 vlCDR2
AASNLES

SEQ ID NO: 23260 - protein, 9 aa, Artificial Sequence
  Description of Artificial Sequence: Synthetic peptide
  XENP020485 vlCDR3
QQSNEDPFT

SEQ ID NO: 23261 - protein, 450 aa, Artificial Sequence
  Description of Artificial Sequence: Synthetic polypeptide
  XENP020486 7G8_H0.38_L0_IgG1_PVA_/S267K Heavy Chain
EVKLEESGGGLVQPGGSMKLSCAASGFTFSDAWMDWVRQSPEKGLEWVAEIRAKANNHATYYAESVKGRFTISRDDSKSSVYLQMNSLRAEDTGIYYCTRLANWDWYFDVWGAGTTVTVSSASTKGPSVFPLAPSSKSTSGGTAALGCLVKDYFPEPVTVSWNSGALTSGVHTFPAVLQSSGLYSLSSVVTVPSSSLGTQTYICNVNHKPSDTKVDKKVEPKSCDKTHTCPPCPAPPVAGPSVFLFPPKPKDTLMISRTPEVTCVVVDVKHEDPEVKFNWYVDGVEVHNAKTKPREEEYNSTYRVVSVLTVLHQDWLNGKEYKCKVSNKALPAPIEKTISKAKGQPREPQVYTLPPSREEMTKNQVSLTCDVSGFYPSDIAVEWESDGQPENNYKTTPPVLDSDGSFFLYSKLTVDKSRWEQGDVFSCSVMHEALHNHYTQKSLSLSPGK

SEQ ID NO: 23262 - protein, 121 aa, Artificial Sequence
  Description of Artificial Sequence: Synthetic polypeptide
  VH of XENP020486
EVKLEESGGGLVQPGGSMKLSCAASGFTFSDAWMDWVRQSPEKGLEWVAEIRAKANNHATYYAESVKGRFTISRDDSKSSVYLQMNSLRAEDTGIYYCTRLANWDWYFDVWGAGTTVTVSS

SEQ ID NO: 23263 - protein, 5 aa, Artificial Sequence
  Description of Artificial Sequence: Synthetic peptide
  XENP020486 vhCDR1
DAWMD

SEQ ID NO: 23264 - protein, 19 aa, Artificial Sequence
  Description of Artificial Sequence: Synthetic peptide
  XENP020486 vhCDR2
EIRAKANNHATYYAESVKG

SEQ ID NO: 23265 - protein, 10 aa, Artificial Sequence
  Description of Artificial Sequence: Synthetic peptide
  XENP020486 vhCDR3
LANWDWYFDV

SEQ ID NO: 23266 - protein, 218 aa, Artificial Sequence; identical to SEQ ID NO: 22266
  Description of Artificial Sequence: Synthetic polypeptide
  XENP020486 7G8_H0.38_L0_IgG1_PVA_/S267K Light Chain

SEQ ID NO: 23267 - protein, 111 aa, Artificial Sequence; identical to SEQ ID NO: 22267
  Description of Artificial Sequence: Synthetic polypeptide
  VL of XENP020486

SEQ ID NO: 23268 - protein, 15 aa, Artificial Sequence
  Description of Artificial Sequence: Synthetic peptide
  XENP020486 vlCDR1
KASQSVDYDGDSYMN

SEQ ID NO: 23269 - protein, 7 aa, Artificial Sequence
  Description of Artificial Sequence: Synthetic peptide
  XENP020486 vlCDR2
AASNLES

SEQ ID NO: 23270 - protein, 9 aa, Artificial Sequence
  Description of Artificial Sequence: Synthetic peptide
  XENP020486 vlCDR3
QQSNEDPFT

SEQ ID NO: 23271 - protein, 450 aa, Artificial Sequence
  Description of Artificial Sequence: Synthetic polypeptide
  XENP020487 7G8_H0.39_L0_IgG1_PVA_/S267K Heavy Chain
EVKLEESGGGLVQPGGSMKLSCAASGFTFSDAWMDWVRQSPEKGLEWVAEIRIKANNHATYYAESVKGRFTISRDDSKSSVYLQMNSLRAEDTGIYYCTRLANWDWYFDVWGAGTTVTVSSASTKGPSVFPLAPSSKSTSGGTAALGCLVKDYFPEPVTVSWNSGALTSGVHTFPAVLQSSGLYSLSSVVTVPSSSLGTQTYICNVNHKPSDTKVDKKVEPKSCDKTHTCPPCPAPPVAGPSVFLFPPKPKDTLMISRTPEVTCVVVDVKHEDPEVKFNWYVDGVEVHNAKTKPREEEYNSTYRVVSVLTVLHQDWLNGKEYKCKVSNKALPAPIEKTISKAKGQPREPQVYTLPPSREEMTKNQVSLTCDVSGFYPSDIAVEWESDGQPENNYKTTPPVLDSDGSFFLYSKLTVDKSRWEQGDVFSCSVMHEALHNHYTQKSLSLSPGK

SEQ ID NO: 23272 - protein, 121 aa, Artificial Sequence
  Description of Artificial Sequence: Synthetic polypeptide
  VH of XENP020487
EVKLEESGGGLVQPGGSMKLSCAASGFTFSDAWMDWVRQSPEKGLEWVAEIRIKANNHATYYAESVKGRFTISRDDSKSSVYLQMNSLRAEDTGIYYCTRLANWDWYFDVWGAGTTVTVSS

SEQ ID NO: 23273 - protein, 5 aa, Artificial Sequence
  Description of Artificial Sequence: Synthetic peptide
  XENP020487 vhCDR1
DAWMD

SEQ ID NO: 23274 - protein, 19 aa, Artificial Sequence
  Description of Artificial Sequence: Synthetic peptide
  XENP020487 vhCDR2
EIRIKANNHATYYAESVKG

SEQ ID NO: 23275 - protein, 10 aa, Artificial Sequence
  Description of Artificial Sequence: Synthetic peptide
  XENP020487 vhCDR3
LANWDWYFDV

SEQ ID NO: 23276 - protein, 218 aa, Artificial Sequence; identical to SEQ ID NO: 22266
  Description of Artificial Sequence: Synthetic polypeptide
  XENP020487 7G8_H0.39_L0_IgG1_PVA_/S267K Light Chain

SEQ ID NO: 23277 - protein, 111 aa, Artificial Sequence; identical to SEQ ID NO: 22267
  Description of Artificial Sequence: Synthetic polypeptide
  VL of XENP020487

SEQ ID NO: 23278 - protein, 15 aa, Artificial Sequence
  Description of Artificial Sequence: Synthetic peptide
  XENP020487 vlCDR1
KASQSVDYDGDSYMN

SEQ ID NO: 23279 - protein, 7 aa, Artificial Sequence
  Description of Artificial Sequence: Synthetic peptide
  XENP020487 vlCDR2
AASNLES

SEQ ID NO: 23280 - protein, 9 aa, Artificial Sequence
  Description of Artificial Sequence: Synthetic peptide
  XENP020487 vlCDR3
QQSNEDPFT

SEQ ID NO: 23281 - protein, 450 aa, Artificial Sequence
  Description of Artificial Sequence: Synthetic polypeptide
  XENP020488 7G8_H0.40_L0_IgG1_PVA_/S267K Heavy Chain
EVKLEESGGGLVQPGGSMKLSCAASGFTFSDAWMDWVRQSPEKGLEWVAEIRQKANNHATYYAESVKGRFTISRDDSKSSVYLQMNSLRAEDTGIYYCTRLANWDWYFDVWGAGTTVTVSSASTKGPSVFPLAPSSKSTSGGTAALGCLVKDYFPEPVTVSWNSGALTSGVHTFPAVLQSSGLYSLSSVVTVPSSSLGTQTYICNVNHKPSDTKVDKKVEPKSCDKTHTCPPCPAPPVAGPSVFLFPPKPKDTLMISRTPEVTCVVVDVKHEDPEVKFNWYVDGVEVHNAKTKPREEEYNSTYRVVSVLTVLHQDWLNGKEYKCKVSNKALPAPIEKTISKAKGQPREPQVYTLPPSREEMTKNQVSLTCDVSGFYPSDIAVEWESDGQPENNYKTTPPVLDSDGSFFLYSKLTVDKSRWEQGDVFSCSVMHEALHNHYTQKSLSLSPGK

SEQ ID NO: 23282 - protein, 121 aa, Artificial Sequence
  Description of Artificial Sequence: Synthetic polypeptide
  VH of XENP020488
EVKLEESGGGLVQPGGSMKLSCAASGFTFSDAWMDWVRQSPEKGLEWVAEIRQKANNHATYYAESVKGRFTISRDDSKSSVYLQMNSLRAEDTGIYYCTRLANWDWYFDVWGAGTTVTVSS

SEQ ID NO: 23283 - protein, 5 aa, Artificial Sequence
  Description of Artificial Sequence: Synthetic peptide
  XENP020488 vhCDR1
DAWMD

SEQ ID NO: 23284 - protein, 19 aa, Artificial Sequence
  Description of Artificial Sequence: Synthetic peptide
  XENP020488 vhCDR2
EIRQKANNHATYYAESVKG

SEQ ID NO: 23285 - protein, 10 aa, Artificial Sequence
  Description of Artificial Sequence: Synthetic peptide
  XENP020488 vhCDR3
LANWDWYFDV

SEQ ID NO: 23286 - protein, 218 aa, Artificial Sequence; identical to SEQ ID NO: 22266
  Description of Artificial Sequence: Synthetic polypeptide
  XENP020488 7G8_H0.40_L0_IgG1_PVA_/S267K Light Chain

SEQ ID NO: 23287 - protein, 111 aa, Artificial Sequence; identical to SEQ ID NO: 22267
  Description of Artificial Sequence: Synthetic polypeptide
  VL of XENP020488

SEQ ID NO: 23288 - protein, 15 aa, Artificial Sequence
  Description of Artificial Sequence: Synthetic peptide
  XENP020488 vlCDR1
KASQSVDYDGDSYMN

SEQ ID NO: 23289 - protein, 7 aa, Artificial Sequence
  Description of Artificial Sequence: Synthetic peptide
  XENP020488 vlCDR2
AASNLES

SEQ ID NO: 23290 - protein, 9 aa, Artificial Sequence
  Description of Artificial Sequence: Synthetic peptide
  XENP020488 vlCDR3
QQSNEDPFT

SEQ ID NO: 23291 - protein, 450 aa, Artificial Sequence
  Description of Artificial Sequence: Synthetic polypeptide
  XENP020489 7G8_H0.41_L0_IgG1_PVA_/S267K Heavy Chain
EVKLEESGGGLVQPGGSMKLSCAASGFTFSDAWMDWVRQSPEKGLEWVAEIRHKANNHATYYAESVKGRFTISRDDSKSSVYLQMNSLRAEDTGIYYCTRLANWDWYFDVWGAGTTVTVSSASTKGPSVFPLAPSSKSTSGGTAALGCLVKDYFPEPVTVSWNSGALTSGVHTFPAVLQSSGLYSLSSVVTVPSSSLGTQTYICNVNHKPSDTKVDKKVEPKSCDKTHTCPPCPAPPVAGPSVFLFPPKPKDTLMISRTPEVTCVVVDVKHEDPEVKFNWYVDGVEVHNAKTKPREEEYNSTYRVVSVLTVLHQDWLNGKEYKCKVSNKALPAPIEKTISKAKGQPREPQVYTLPPSREEMTKNQVSLTCDVSGFYPSDIAVEWESDGQPENNYKTTPPVLDSDGSFFLYSKLTVDKSRWEQGDVFSCSVMHEALHNHYTQKSLSLSPGK

SEQ ID NO: 23292 - protein, 121 aa, Artificial Sequence
  Description of Artificial Sequence: Synthetic polypeptide
  VH of XENP020489
EVKLEESGGGLVQPGGSMKLSCAASGFTFSDAWMDWVRQSPEKGLEWVAEIRHKANNHATYYAESVKGRFTISRDDSKSSVYLQMNSLRAEDTGIYYCTRLANWDWYFDVWGAGTTVTVSS

SEQ ID NO: 23293 - protein, 5 aa, Artificial Sequence
  Description of Artificial Sequence: Synthetic peptide
  XENP020489 vhCDR1
DAWMD

SEQ ID NO: 23294 - protein, 19 aa, Artificial Sequence
  Description of Artificial Sequence: Synthetic peptide
  XENP020489 vhCDR2
EIRHKANNHATYYAESVKG

SEQ ID NO: 23295 - protein, 10 aa, Artificial Sequence
  Description of Artificial Sequence: Synthetic peptide
  XENP020489 vhCDR3
LANWDWYFDV

SEQ ID NO: 23296 - protein, 218 aa, Artificial Sequence; identical to SEQ ID NO: 22266
  Description of Artificial Sequence: Synthetic polypeptide
  XENP020489 7G8_H0.41_L0_IgG1_PVA_/S267K Light Chain

SEQ ID NO: 23297 - protein, 111 aa, Artificial Sequence; identical to SEQ ID NO: 22267
  Description of Artificial Sequence: Synthetic polypeptide
  VL of XENP020489

SEQ ID NO: 23298 - protein, 15 aa, Artificial Sequence
  Description of Artificial Sequence: Synthetic peptide
  XENP020489 vlCDR1
KASQSVDYDGDSYMN

SEQ ID NO: 23299 - protein, 7 aa, Artificial Sequence
  Description of Artificial Sequence: Synthetic peptide
  XENP020489 vlCDR2
AASNLES

SEQ ID NO: 23300 - protein, 9 aa, Artificial Sequence
  Description of Artificial Sequence: Synthetic peptide
  XENP020489 vlCDR3
QQSNEDPFT

SEQ ID NO: 23301 - protein, 450 aa, Artificial Sequence
  Description of Artificial Sequence: Synthetic polypeptide
  XENP020490 7G8_H0.42_L0_IgG1_PVA_/S267K Heavy Chain
EVKLEESGGGLVQPGGSMKLSCAASGFTFSDAWMDWVRQSPEKGLEWVAEIRDKANNHATYYAESVKGRFTISRDDSKSSVYLQMNSLRAEDTGIYYCTRLANWDWYFDVWGAGTTVTVSSASTKGPSVFPLAPSSKSTSGGTAALGCLVKDYFPEPVTVSWNSGALTSGVHTFPAVLQSSGLYSLSSVVTVPSSSLGTQTYICNVNHKPSDTKVDKKVEPKSCDKTHTCPPCPAPPVAGPSVFLFPPKPKDTLMISRTPEVTCVVVDVKHEDPEVKFNWYVDGVEVHNAKTKPREEEYNSTYRVVSVLTVLHQDWLNGKEYKCKVSNKALPAPIEKTISKAKGQPREPQVYTLPPSREEMTKNQVSLTCDVSGFYPSDIAVEWESDGQPENNYKTTPPVLDSDGSFFLYSKLTVDKSRWEQGDVFSCSVMHEALHNHYTQKSLSLSPGK

SEQ ID NO: 23302 - protein, 121 aa, Artificial Sequence
  Description of Artificial Sequence: Synthetic polypeptide
  VH of XENP020490
EVKLEESGGGLVQPGGSMKLSCAASGFTFSDAWMDWVRQSPEKGLEWVAEIRDKANNHATYYAESVKGRFTISRDDSKSSVYLQMNSLRAEDTGIYYCTRLANWDWYFDVWGAGTTVTVSS

SEQ ID NO: 23303 - protein, 5 aa, Artificial Sequence
  Description of Artificial Sequence: Synthetic peptide
  XENP020490 vhCDR1
DAWMD

SEQ ID NO: 23304 - protein, 19 aa, Artificial Sequence
  Description of Artificial Sequence: Synthetic peptide
  XENP020490 vhCDR2
EIRDKANNHATYYAESVKG

SEQ ID NO: 23305 - protein, 10 aa, Artificial Sequence
  Description of Artificial Sequence: Synthetic peptide
  XENP020490 vhCDR3
LANWDWYFDV

SEQ ID NO: 23306 - protein, 218 aa, Artificial Sequence; identical to SEQ ID NO: 22266
  Description of Artificial Sequence: Synthetic polypeptide
  XENP020490 7G8_H0.42_L0_IgG1_PVA_/S267K Light Chain

SEQ ID NO: 23307 - protein, 111 aa, Artificial Sequence; identical to SEQ ID NO: 22267
  Description of Artificial Sequence: Synthetic polypeptide
  VL of XENP020490

SEQ ID NO: 23308 - protein, 15 aa, Artificial Sequence
  Description of Artificial Sequence: Synthetic peptide
  XENP020490 vlCDR1
KASQSVDYDGDSYMN

SEQ ID NO: 23309 - protein, 7 aa, Artificial Sequence
  Description of Artificial Sequence: Synthetic peptide
  XENP020490 vlCDR2
AASNLES

SEQ ID NO: 23310 - protein, 9 aa, Artificial Sequence
  Description of Artificial Sequence: Synthetic peptide
  XENP020490 vlCDR3
QQSNEDPFT

SEQ ID NO: 23311 - protein, 450 aa, Artificial Sequence
  Description of Artificial Sequence: Synthetic polypeptide
  XENP020491 7G8_H0.43_L0_IgG1_PVA_/S267K Heavy Chain
EVKLEESGGGLVQPGGSMKLSCAASGFTFSDAWMDWVRQSPEKGLEWVAEIRKKANNHATYYAESVKGRFTISRDDSKSSVYLQMNSLRAEDTGIYYCTRLANWDWYFDVWGAGTTVTVSSASTKGPSVFPLAPSSKSTSGGTAALGCLVKDYFPEPVTVSWNSGALTSGVHTFPAVLQSSGLYSLSSVVTVPSSSLGTQTYICNVNHKPSDTKVDKKVEPKSCDKTHTCPPCPAPPVAGPSVFLFPPKPKDTLMISRTPEVTCVVVDVKHEDPEVKFNWYVDGVEVHNAKTKPREEEYNSTYRVVSVLTVLHQDWLNGKEYKCKVSNKALPAPIEKTISKAKGQPREPQVYTLPPSREEMTKNQVSLTCDVSGFYPSDIAVEWESDGQPENNYKTTPPVLDSDGSFFLYSKLTVDKSRWEQGDVFSCSVMHEALHNHYTQKSLSLSPGK

SEQ ID NO: 23312 - protein, 121 aa, Artificial Sequence
  Description of Artificial Sequence: Synthetic polypeptide
  VH of XENP020491
EVKLEESGGGLVQPGGSMKLSCAASGFTFSDAWMDWVRQSPEKGLEWVAEIRKKANNHATYYAESVKGRFTISRDDSKSSVYLQMNSLRAEDTGIYYCTRLANWDWYFDVWGAGTTVTVSS

SEQ ID NO: 23313 - protein, 5 aa, Artificial Sequence
  Description of Artificial Sequence: Synthetic peptide
  XENP020491 vhCDR1
DAWMD

SEQ ID NO: 23314 - protein, 19 aa, Artificial Sequence
  Description of Artificial Sequence: Synthetic peptide
  XENP020491 vhCDR2
EIRKKANNHATYYAESVKG

SEQ ID NO: 23315 - protein, 10 aa, Artificial Sequence
  Description of Artificial Sequence: Synthetic peptide
  XENP020491 vhCDR3
LANWDWYFDV

SEQ ID NO: 23316 - protein, 218 aa, Artificial Sequence; identical to SEQ ID NO: 22266
  Description of Artificial Sequence: Synthetic polypeptide
  XENP020491 7G8_H0.43_L0_IgG1_PVA_/S267K Light Chain

SEQ ID NO: 23317 - protein, 111 aa, Artificial Sequence; identical to SEQ ID NO: 22267
  Description of Artificial Sequence: Synthetic polypeptide
  VL of XENP020491

SEQ ID NO: 23318 - protein, 15 aa, Artificial Sequence
  Description of Artificial Sequence: Synthetic peptide
  XENP020491 vlCDR1
KASQSVDYDGDSYMN

SEQ ID NO: 23319 - protein, 7 aa, Artificial Sequence
  Description of Artificial Sequence: Synthetic peptide
  XENP020491 vlCDR2
AASNLES

SEQ ID NO: 23320 - protein, 9 aa, Artificial Sequence
  Description of Artificial Sequence: Synthetic peptide
  XENP020491 vlCDR3
QQSNEDPFT

SEQ ID NO: 23321 - protein, 450 aa, Artificial Sequence
  Description of Artificial Sequence: Synthetic polypeptide
  XENP020492 7G8_H0.44_L0_IgG1_PVA_/S267K Heavy Chain
EVKLEESGGGLVQPGGSMKLSCAASGFTFSDAWMDWVRQSPEKGLEWVAEIRYKANNHATYYAESVKGRFTISRDDSKSSVYLQMNSLRAEDTGIYYCTRLANWDWYFDVWGAGTTVTVSSASTKGPSVFPLAPSSKSTSGGTAALGCLVKDYFPEPVTVSWNSGALTSGVHTFPAVLQSSGLYSLSSVVTVPSSSLGTQTYICNVNHKPSDTKVDKKVEPKSCDKTHTCPPCPAPPVAGPSVFLFPPKPKDTLMISRTPEVTCVVVDVKHEDPEVKFNWYVDGVEVHNAKTKPREEEYNSTYRVVSVLTVLHQDWLNGKEYKCKVSNKALPAPIEKTISKAKGQPREPQVYTLPPSREEMTKNQVSLTCDVSGFYPSDIAVEWESDGQPENNYKTTPPVLDSDGSFFLYSKLTVDKSRWEQGDVFSCSVMHEALHNHYTQKSLSLSPGK

SEQ ID NO: 23322 - protein, 121 aa, Artificial Sequence
  Description of Artificial Sequence: Synthetic polypeptide
  VH of XENP020492
EVKLEESGGGLVQPGGSMKLSCAASGFTFSDAWMDWVRQSPEKGLEWVAEIRYKANNHATYYAESVKGRFTISRDDSKSSVYLQMNSLRAEDTGIYYCTRLANWDWYFDVWGAGTTVTVSS

SEQ ID NO: 23323 - protein, 5 aa, Artificial Sequence
  Description of Artificial Sequence: Synthetic peptide
  XENP020492 vhCDR1
DAWMD

SEQ ID NO: 23324 - protein, 19 aa, Artificial Sequence
  Description of Artificial Sequence: Synthetic peptide
  XENP020492 vhCDR2
EIRYKANNHATYYAESVKG

SEQ ID NO: 23325 - protein, 10 aa, Artificial Sequence
  Description of Artificial Sequence: Synthetic peptide
  XENP020492 vhCDR3
LANWDWYFDV

SEQ ID NO: 23326 - protein, 218 aa, Artificial Sequence; identical to SEQ ID NO: 22266
  Description of Artificial Sequence: Synthetic polypeptide
  XENP020492 7G8_H0.44_L0_IgG1_PVA_/S267K Light Chain

SEQ ID NO: 23327 - protein, 111 aa, Artificial Sequence; identical to SEQ ID NO: 22267
  Description of Artificial Sequence: Synthetic polypeptide
  VL of XENP020492

SEQ ID NO: 23328 - protein, 15 aa, Artificial Sequence
  Description of Artificial Sequence: Synthetic peptide
  XENP020492 vlCDR1
KASQSVDYDGDSYMN

SEQ ID NO: 23329 - protein, 7 aa, Artificial Sequence
  Description of Artificial Sequence: Synthetic peptide
  XENP020492 vlCDR2
AASNLES

SEQ ID NO: 23330 - protein, 9 aa, Artificial Sequence
  Description of Artificial Sequence: Synthetic peptide
  XENP020492 vlCDR3
QQSNEDPFT

SEQ ID NO: 23331 - protein, 450 aa, Artificial Sequence
  Description of Artificial Sequence: Synthetic polypeptide
  XENP020493 7G8_H0.45_L0_IgG1_PVA_/S267K Heavy Chain
EVKLEESGGGLVQPGGSMKLSCAASGFTFSDAWMDWVRQSPEKGLEWVAEIRTRANNHATYYAESVKGRFTISRDDSKSSVYLQMNSLRAEDTGIYYCTRLANWDWYFDVWGAGTTVTVSSASTKGPSVFPLAPSSKSTSGGTAALGCLVKDYFPEPVTVSWNSGALTSGVHTFPAVLQSSGLYSLSSVVTVPSSSLGTQTYICNVNHKPSDTKVDKKVEPKSCDKTHTCPPCPAPPVAGPSVFLFPPKPKDTLMISRTPEVTCVVVDVKHEDPEVKFNWYVDGVEVHNAKTKPREEEYNSTYRVVSVLTVLHQDWLNGKEYKCKVSNKALPAPIEKTISKAKGQPREPQVYTLPPSREEMTKNQVSLTCDVSGFYPSDIAVEWESDGQPENNYKTTPPVLDSDGSFFLYSKLTVDKSRWEQGDVFSCSVMHEALHNHYTQKSLSLSPGK

SEQ ID NO: 23332 - protein, 121 aa, Artificial Sequence
  Description of Artificial Sequence: Synthetic polypeptide
  VH of XENP020493
EVKLEESGGGLVQPGGSMKLSCAASGFTFSDAWMDWVRQSPEKGLEWVAEIRTRANNHATYYAESVKGRFTISRDDSKSSVYLQMNSLRAEDTGIYYCTRLANWDWYFDVWGAGTTVTVSS

SEQ ID NO: 23333 - protein, 5 aa, Artificial Sequence
  Description of Artificial Sequence: Synthetic peptide
  XENP020493 vhCDR1
DAWMD

SEQ ID NO: 23334 - protein, 19 aa, Artificial Sequence
  Description of Artificial Sequence: Synthetic peptide
  XENP020493 vhCDR2
EIRTRANNHATYYAESVKG

SEQ ID NO: 23335 - protein, 10 aa, Artificial Sequence
  Description of Artificial Sequence: Synthetic peptide
  XENP020493 vhCDR3
LANWDWYFDV

SEQ ID NO: 23336 - protein, 218 aa, Artificial Sequence; identical to SEQ ID NO: 22266
  Description of Artificial Sequence: Synthetic polypeptide
  XENP020493 7G8_H0.45_L0_IgG1_PVA_/S267K Light Chain

SEQ ID NO: 23337 - protein, 111 aa, Artificial Sequence; identical to SEQ ID NO: 22267
  Description of Artificial Sequence: Synthetic polypeptide
  VL of XENP020493

SEQ ID NO: 23338 - protein, 15 aa, Artificial Sequence
  Description of Artificial Sequence: Synthetic peptide
  XENP020493 vlCDR1
KASQSVDYDGDSYMN

SEQ ID NO: 23339 - protein, 7 aa, Artificial Sequence
  Description of Artificial Sequence: Synthetic peptide
  XENP020493 vlCDR2
AASNLES

SEQ ID NO: 23340 - protein, 9 aa, Artificial Sequence
  Description of Artificial Sequence: Synthetic peptide
  XENP020493 vlCDR3
QQSNEDPFT

SEQ ID NO: 23341 - protein, 450 aa, Artificial Sequence
  Description of Artificial Sequence: Synthetic polypeptide
  XENP020494 7G8_H0.46_L0_IgG1_PVA_/S267K Heavy Chain
EVKLEESGGGLVQPGGSMKLSCAASGFTFSDAWMDWVRQSPEKGLEWVAEIRTEANNHATYYAESVKGRFTISRDDSKSSVYLQMNSLRAEDTGIYYCTRLANWDWYFDVWGAGTTVTVSSASTKGPSVFPLAPSSKSTSGGTAALGCLVKDYFPEPVTVSWNSGALTSGVHTFPAVLQSSGLYSLSSVVTVPSSSLGTQTYICNVNHKPSDTKVDKKVEPKSCDKTHTCPPCPAPPVAGPSVFLFPPKPKDTLMISRTPEVTCVVVDVKHEDPEVKFNWYVDGVEVHNAKTKPREEEYNSTYRVVSVLTVLHQDWLNGKEYKCKVSNKALPAPIEKTISKAKGQPREPQVYTLPPSREEMTKNQVSLTCDVSGFYPSDIAVEWESDGQPENNYKTTPPVLDSDGSFFLYSKLTVDKSRWEQGDVFSCSVMHEALHNHYTQKSLSLSPGK

SEQ ID NO: 23342 - protein, 121 aa, Artificial Sequence
  Description of Artificial Sequence: Synthetic polypeptide
  VH of XENP020494
EVKLEESGGGLVQPGGSMKLSCAASGFTFSDAWMDWVRQSPEKGLEWVAEIRTEANNHATYYAESVKGRFTISRDDSKSSVYLQMNSLRAEDTGIYYCTRLANWDWYFDVWGAGTTVTVSS

SEQ ID NO: 23343 - protein, 5 aa, Artificial Sequence
  Description of Artificial Sequence: Synthetic peptide
  XENP020494 vhCDR1
DAWMD

SEQ ID NO: 23344 - protein, 19 aa, Artificial Sequence
  Description of Artificial Sequence: Synthetic peptide
  XENP020494 vhCDR2
EIRTEANNHATYYAESVKG

SEQ ID NO: 23345 - protein, 10 aa, Artificial Sequence
  Description of Artificial Sequence: Synthetic peptide
  XENP020494 vhCDR3
LANWDWYFDV

SEQ ID NO: 23346 - protein, 218 aa, Artificial Sequence; identical to SEQ ID NO: 22266
  Description of Artificial Sequence: Synthetic polypeptide
  XENP020494 7G8_H0.46_L0_IgG1_PVA_/S267K Light Chain

SEQ ID NO: 23347 - protein, 111 aa, Artificial Sequence; identical to SEQ ID NO: 22267
  Description of Artificial Sequence: Synthetic polypeptide
  VL of XENP020494

SEQ ID NO: 23348 - protein, 15 aa, Artificial Sequence
  Description of Artificial Sequence: Synthetic peptide
  XENP020494 vlCDR1
KASQSVDYDGDSYMN

SEQ ID NO: 23349 - protein, 7 aa, Artificial Sequence
  Description of Artificial Sequence: Synthetic peptide
  XENP020494 vlCDR2
AASNLES

SEQ ID NO: 23350 - protein, 9 aa, Artificial Sequence
  Description of Artificial Sequence: Synthetic peptide
  XENP020494 vlCDR3
QQSNEDPFT

SEQ ID NO: 23351 - protein, 450 aa, Artificial Sequence
  Description of Artificial Sequence: Synthetic polypeptide
  XENP020495 7G8_H0.47_L0_IgG1_PVA_/S267K Heavy Chain
EVKLEESGGGLVQPGGSMKLSCAASGFTFSDAWMDWVRQSPEKGLEWVAEIRTHANNHATYYAESVKGRFTISRDDSKSSVYLQMNSLRAEDTGIYYCTRLANWDWYFDVWGAGTTVTVSSASTKGPSVFPLAPSSKSTSGGTAALGCLVKDYFPEPVTVSWNSGALTSGVHTFPAVLQSSGLYSLSSVVTVPSSSLGTQTYICNVNHKPSDTKVDKKVEPKSCDKTHTCPPCPAPPVAGPSVFLFPPKPKDTLMISRTPEVTCVVVDVKHEDPEVKFNWYVDGVEVHNAKTKPREEEYNSTYRVVSVLTVLHQDWLNGKEYKCKVSNKALPAPIEKTISKAKGQPREPQVYTLPPSREEMTKNQVSLTCDVSGFYPSDIAVEWESDGQPENNYKTTPPVLDSDGSFFLYSKLTVDKSRWEQGDVFSCSVMHEALHNHYTQKSLSLSPGK

SEQ ID NO: 23352 - protein, 121 aa, Artificial Sequence
  Description of Artificial Sequence: Synthetic polypeptide
  VH of XENP020495
EVKLEESGGGLVQPGGSMKLSCAASGFTFSDAWMDWVRQSPEKGLEWVAEIRTHANNHATYYAESVKGRFTISRDDSKSSVYLQMNSLRAEDTGIYYCTRLANWDWYFDVWGAGTTVTVSS

SEQ ID NO: 23353 - protein, 5 aa, Artificial Sequence
  Description of Artificial Sequence: Synthetic peptide
  XENP020495 vhCDR1
DAWMD

SEQ ID NO: 23354 - protein, 19 aa, Artificial Sequence
  Description of Artificial Sequence: Synthetic peptide
  XENP020495 vhCDR2
EIRTHANNHATYYAESVKG

SEQ ID NO: 23355 - protein, 10 aa, Artificial Sequence
  Description of Artificial Sequence: Synthetic peptide
  XENP020495 vhCDR3
LANWDWYFDV

SEQ ID NO: 23356 - protein, 218 aa, Artificial Sequence; identical to SEQ ID NO: 22266
  Description of Artificial Sequence: Synthetic polypeptide
  XENP020495 7G8_H0.47_L0_IgG1_PVA_/S267K Light Chain

SEQ ID NO: 23357 - protein, 111 aa, Artificial Sequence; identical to SEQ ID NO: 22267
  Description of Artificial Sequence: Synthetic polypeptide
  VL of XENP020495

SEQ ID NO: 23358 - protein, 15 aa, Artificial Sequence
  Description of Artificial Sequence: Synthetic peptide
  XENP020495 vlCDR1
KASQSVDYDGDSYMN

SEQ ID NO: 23359 - protein, 7 aa, Artificial Sequence
  Description of Artificial Sequence: Synthetic peptide
  XENP020495 vlCDR2
AASNLES

SEQ ID NO: 23360 - protein, 9 aa, Artificial Sequence
  Description of Artificial Sequence: Synthetic peptide
  XENP020495 vlCDR3
QQSNEDPFT

SEQ ID NO: 23361 - protein, 450 aa, Artificial Sequence
  Description of Artificial Sequence: Synthetic polypeptide
  XENP020496 7G8_H0.48_L0_IgG1_PVA_/S267K Heavy Chain
EVKLEESGGGLVQPGGSMKLSCAASGFTFSDAWMDWVRQSPEKGLEWVAEIRTSANNHATYYAESVKGRFTISRDDSKSSVYLQMNSLRAEDTGIYYCTRLANWDWYFDVWGAGTTVTVSSASTKGPSVFPLAPSSKSTSGGTAALGCLVKDYFPEPVTVSWNSGALTSGVHTFPAVLQSSGLYSLSSVVTVPSSSLGTQTYICNVNHKPSDTKVDKKVEPKSCDKTHTCPPCPAPPVAGPSVFLFPPKPKDTLMISRTPEVTCVVVDVKHEDPEVKFNWYVDGVEVHNAKTKPREEEYNSTYRVVSVLTVLHQDWLNGKEYKCKVSNKALPAPIEKTISKAKGQPREPQVYTLPPSREEMTKNQVSLTCDVSGFYPSDIAVEWESDGQPENNYKTTPPVLDSDGSFFLYSKLTVDKSRWEQGDVFSCSVMHEALHNHYTQKSLSLSPGK

SEQ ID NO: 23362 - protein, 121 aa, Artificial Sequence
  Description of Artificial Sequence: Synthetic polypeptide
  VH of XENP020496
EVKLEESGGGLVQPGGSMKLSCAASGFTFSDAWMDWVRQSPEKGLEWVAEIRTSANNHATYYAESVKGRFTISRDDSKSSVYLQMNSLRAEDTGIYYCTRLANWDWYFDVWGAGTTVTVSS

SEQ ID NO: 23363 - protein, 5 aa, Artificial Sequence
  Description of Artificial Sequence: Synthetic peptide
  XENP020496 vhCDR1
DAWMD

SEQ ID NO: 23364 - protein, 19 aa, Artificial Sequence
  Description of Artificial Sequence: Synthetic peptide
  XENP020496 vhCDR2
EIRTSANNHATYYAESVKG

SEQ ID NO: 23365 - protein, 10 aa, Artificial Sequence
  Description of Artificial Sequence: Synthetic peptide
  XENP020496 vhCDR3
LANWDWYFDV

SEQ ID NO: 23366 - protein, 218 aa, Artificial Sequence; identical to SEQ ID NO: 22266
  Description of Artificial Sequence: Synthetic polypeptide
  XENP020496 7G8_H0.48_L0_IgG1_PVA_/S267K Light Chain

SEQ ID NO: 23367 - protein, 111 aa, Artificial Sequence; identical to SEQ ID NO: 22267
  Description of Artificial Sequence: Synthetic polypeptide
  VL of XENP020496

SEQ ID NO: 23368 - protein, 15 aa, Artificial Sequence
  Description of Artificial Sequence: Synthetic peptide
  XENP020496 vlCDR1
KASQSVDYDGDSYMN

SEQ ID NO: 23369 - protein, 7 aa, Artificial Sequence
  Description of Artificial Sequence: Synthetic peptide
  XENP020496 vlCDR2
AASNLES

SEQ ID NO: 23370 - protein, 9 aa, Artificial Sequence
  Description of Artificial Sequence: Synthetic peptide
  XENP020496 vlCDR3
QQSNEDPFT

SEQ ID NO: 23371 - protein, 450 aa, Artificial Sequence
  Description of Artificial Sequence: Synthetic polypeptide
  XENP020501 7G8_H0.49_L0_IgG1_PVA_/S267K Heavy Chain
EVKLEESGGGLVQPGGSMKLSCAASGFTFSDAWMDWVRQSPEKGLEWVAEIRTDANNHATYYAESVKGRFTISRDDSKSSVYLQMNSLRAEDTGIYYCTRLANWDWYFDVWGAGTTVTVSSASTKGPSVFPLAPSSKSTSGGTAALGCLVKDYFPEPVTVSWNSGALTSGVHTFPAVLQSSGLYSLSSVVTVPSSSLGTQTYICNVNHKPSDTKVDKKVEPKSCDKTHTCPPCPAPPVAGPSVFLFPPKPKDTLMISRTPEVTCVVVDVKHEDPEVKFNWYVDGVEVHNAKTKPREEEYNSTYRVVSVLTVLHQDWLNGKEYKCKVSNKALPAPIEKTISKAKGQPREPQVYTLPPSREEMTKNQVSLTCDVSGFYPSDIAVEWESDGQPENNYKTTPPVLDSDGSFFLYSKLTVDKSRWEQGDVFSCSVMHEALHNHYTQKSLSLSPGK

SEQ ID NO: 23372 - protein, 121 aa, Artificial Sequence
  Description of Artificial Sequence: Synthetic polypeptide
  VH of XENP020501
EVKLEESGGGLVQPGGSMKLSCAASGFTFSDAWMDWVRQSPEKGLEWVAEIRTDANNHATYYAESVKGRFTISRDDSKSSVYLQMNSLRAEDTGIYYCTRLANWDWYFDVWGAGTTVTVSS

SEQ ID NO: 23373 - protein, 5 aa, Artificial Sequence
  Description of Artificial Sequence: Synthetic peptide
  XENP020501 vhCDR1
DAWMD

SEQ ID NO: 23374 - protein, 19 aa, Artificial Sequence
  Description of Artificial Sequence: Synthetic peptide
  XENP020501 vhCDR2
EIRTDANNHATYYAESVKG

SEQ ID NO: 23375 - protein, 10 aa, Artificial Sequence
  Description of Artificial Sequence: Synthetic peptide
  XENP020501 vhCDR3
LANWDWYFDV

SEQ ID NO: 23376 - protein, 218 aa, Artificial Sequence; identical to SEQ ID NO: 22266
  Description of Artificial Sequence: Synthetic polypeptide
  XENP020501 7G8_H0.49_L0_IgG1_PVA_/S267K Light Chain

SEQ ID NO: 23377 - protein, 111 aa, Artificial Sequence; identical to SEQ ID NO: 22267
  Description of Artificial Sequence: Synthetic polypeptide
  VL of XENP020501

SEQ ID NO: 23378 - protein, 15 aa, Artificial Sequence
  Description of Artificial Sequence: Synthetic peptide
  XENP020501 vlCDR1
KASQSVDYDGDSYMN

SEQ ID NO: 23379 - protein, 7 aa, Artificial Sequence
  Description of Artificial Sequence: Synthetic peptide
  XENP020501 vlCDR2
AASNLES

SEQ ID NO: 23380 - protein, 9 aa, Artificial Sequence
  Description of Artificial Sequence: Synthetic peptide
  XENP020501 vlCDR3
QQSNEDPFT

SEQ ID NO: 23381 - protein, 450 aa, Artificial Sequence
  Description of Artificial Sequence: Synthetic polypeptide
  XENP020502 7G8_H0.50_L0_IgG1_PVA_/S267K Heavy Chain
EVKLEESGGGLVQPGGSMKLSCAASGFTFSDAWMDWVRQSPEKGLEWVAEIRTAANNHATYYAESVKGRFTISRDDSKSSVYLQMNSLRAEDTGIYYCTRLANWDWYFDVWGAGTTVTVSSASTKGPSVFPLAPSSKSTSGGTAALGCLVKDYFPEPVTVSWNSGALTSGVHTFPAVLQSSGLYSLSSVVTVPSSSLGTQTYICNVNHKPSDTKVDKKVEPKSCDKTHTCPPCPAPPVAGPSVFLFPPKPKDTLMISRTPEVTCVVVDVKHEDPEVKFNWYVDGVEVHNAKTKPREEEYNSTYRVVSVLTVLHQDWLNGKEYKCKVSNKALPAPIEKTISKAKGQPREPQVYTLPPSREEMTKNQVSLTCDVSGFYPSDIAVEWESDGQPENNYKTTPPVLDSDGSFFLYSKLTVDKSRWEQGDVFSCSVMHEALHNHYTQKSLSLSPGK

SEQ ID NO: 23382 - protein, 121 aa, Artificial Sequence
  Description of Artificial Sequence: Synthetic polypeptide
  VH of XENP020502
EVKLEESGGGLVQPGGSMKLSCAASGFTFSDAWMDWVRQSPEKGLEWVAEIRTAANNHATYYAESVKGRFTISRDDSKSSVYLQMNSLRAEDTGIYYCTRLANWDWYFDVWGAGTTVTVSS

SEQ ID NO: 23383 - protein, 5 aa, Artificial Sequence
  Description of Artificial Sequence: Synthetic peptide
  XENP020502 vhCDR1
DAWMD

SEQ ID NO: 23384 - protein, 19 aa, Artificial Sequence
  Description of Artificial Sequence: Synthetic peptide
  XENP020502 vhCDR2
EIRTAANNHATYYAESVKG

SEQ ID NO: 23385 - protein, 10 aa, Artificial Sequence
  Description of Artificial Sequence: Synthetic peptide
  XENP020502 vhCDR3
LANWDWYFDV

SEQ ID NO: 23386 - protein, 218 aa, Artificial Sequence; identical to SEQ ID NO: 22266
  Description of Artificial Sequence: Synthetic polypeptide
  XENP020502 7G8_H0.50_L0_IgG1_PVA_/S267K Light Chain

SEQ ID NO: 23387 - protein, 111 aa, Artificial Sequence; identical to SEQ ID NO: 22267
  Description of Artificial Sequence: Synthetic polypeptide
  VL of XENP020502

SEQ ID NO: 23388 - protein, 15 aa, Artificial Sequence
  Description of Artificial Sequence: Synthetic peptide
  XENP020502 vlCDR1
KASQSVDYDGDSYMN

SEQ ID NO: 23389 - protein, 7 aa, Artificial Sequence
  Description of Artificial Sequence: Synthetic peptide
  XENP020502 vlCDR2
AASNLES

SEQ ID NO: 23390 - protein, 9 aa, Artificial Sequence
  Description of Artificial Sequence: Synthetic peptide
  XENP020502 vlCDR3
QQSNEDPFT

SEQ ID NO: 23391 - protein, 450 aa, Artificial Sequence
  Description of Artificial Sequence: Synthetic polypeptide
  XENP020503 7G8_H0.51_L0_IgG1_PVA_/S267K Heavy Chain
EVKLEESGGGLVQPGGSMKLSCAASGFTFSDAWMDWVRQSPEKGLEWVAEIRTGANNHATYYAESVKGRFTISRDDSKSSVYLQMNSLRAEDTGIYYCTRLANWDWYFDVWGAGTTVTVSSASTKGPSVFPLAPSSKSTSGGTAALGCLVKDYFPEPVTVSWNSGALTSGVHTFPAVLQSSGLYSLSSVVTVPSSSLGTQTYICNVNHKPSDTKVDKKVEPKSCDKTHTCPPCPAPPVAGPSVFLFPPKPKDTLMISRTPEVTCVVVDVKHEDPEVKFNWYVDGVEVHNAKTKPREEEYNSTYRVVSVLTVLHQDWLNGKEYKCKVSNKALPAPIEKTISKAKGQPREPQVYTLPPSREEMTKNQVSLTCDVSGFYPSDIAVEWESDGQPENNYKTTPPVLDSDGSFFLYSKLTVDKSRWEQGDVFSCSVMHEALHNHYTQKSLSLSPGK

SEQ ID NO: 23392 - protein, 121 aa, Artificial Sequence
  Description of Artificial Sequence: Synthetic polypeptide
  VH of XENP020503
EVKLEESGGGLVQPGGSMKLSCAASGFTFSDAWMDWVRQSPEKGLEWVAEIRTGANNHATYYAESVKGRFTISRDDSKSSVYLQMNSLRAEDTGIYYCTRLANWDWYFDVWGAGTTVTVSS

SEQ ID NO: 23393 - protein, 5 aa, Artificial Sequence
  Description of Artificial Sequence: Synthetic peptide
  XENP020503 vhCDR1
DAWMD

SEQ ID NO: 23394 - protein, 19 aa, Artificial Sequence
  Description of Artificial Sequence: Synthetic peptide
  XENP020503 vhCDR2
EIRTGANNHATYYAESVKG

SEQ ID NO: 23395 - protein, 10 aa, Artificial Sequence
  Description of Artificial Sequence: Synthetic peptide
  XENP020503 vhCDR3
LANWDWYFDV

SEQ ID NO: 23396 - protein, 218 aa, Artificial Sequence; identical to SEQ ID NO: 22266
  Description of Artificial Sequence: Synthetic polypeptide
  XENP020503 7G8_H0.51_L0_IgG1_PVA_/S267K Light Chain

SEQ ID NO: 23397 - protein, 111 aa, Artificial Sequence; identical to SEQ ID NO: 22267
  Description of Artificial Sequence: Synthetic polypeptide
  VL of XENP020503

SEQ ID NO: 23398 - protein, 15 aa, Artificial Sequence
  Description of Artificial Sequence: Synthetic peptide
  XENP020503 vlCDR1
KASQSVDYDGDSYMN

SEQ ID NO: 23399 - protein, 7 aa, Artificial Sequence
  Description of Artificial Sequence: Synthetic peptide
  XENP020503 vlCDR2
AASNLES

SEQ ID NO: 23400 - protein, 9 aa, Artificial Sequence
  Description of Artificial Sequence: Synthetic peptide
  XENP020503 vlCDR3
QQSNEDPFT

SEQ ID NO: 23401 - protein, 450 aa, Artificial Sequence
  Description of Artificial Sequence: Synthetic polypeptide
  XENP020504 7G8_H0.52_L0_IgG1_PVA_/S267K Heavy Chain
EVKLEESGGGLVQPGGSMKLSCAASGFTFSDAWMDWVRQSPEKGLEWVAEIRTYANNHATYYAESVKGRFTISRDDSKSSVYLQMNSLRAEDTGIYYCTRLANWDWYFDVWGAGTTVTVSSASTKGPSVFPLAPSSKSTSGGTAALGCLVKDYFPEPVTVSWNSGALTSGVHTFPAVLQSSGLYSLSSVVTVPSSSLGTQTYICNVNHKPSDTKVDKKVEPKSCDKTHTCPPCPAPPVAGPSVFLFPPKPKDTLMISRTPEVTCVVVDVKHEDPEVKFNWYVDGVEVHNAKTKPREEEYNSTYRVVSVLTVLHQDWLNGKEYKCKVSNKALPAPIEKTISKAKGQPREPQVYTLPPSREEMTKNQVSLTCDVSGFYPSDIAVEWESDGQPENNYKTTPPVLDSDGSFFLYSKLTVDKSRWEQGDVFSCSVMHEALHNHYTQKSLSLSPGK

SEQ ID NO: 23402 - protein, 121 aa, Artificial Sequence
  Description of Artificial Sequence: Synthetic polypeptide
  VH of XENP020504
EVKLEESGGGLVQPGGSMKLSCAASGFTFSDAWMDWVRQSPEKGLEWVAEIRTYANNHATYYAESVKGRFTISRDDSKSSVYLQMNSLRAEDTGIYYCTRLANWDWYFDVWGAGTTVTVSS

SEQ ID NO: 23403 - protein, 5 aa, Artificial Sequence
  Description of Artificial Sequence: Synthetic peptide
  XENP020504 vhCDR1
DAWMD

SEQ ID NO: 23404 - protein, 19 aa, Artificial Sequence
  Description of Artificial Sequence: Synthetic peptide
  XENP020504 vhCDR2
EIRTYANNHATYYAESVKG

SEQ ID NO: 23405 - protein, 10 aa, Artificial Sequence
  Description of Artificial Sequence: Synthetic peptide
  XENP020504 vhCDR3
LANWDWYFDV

SEQ ID NO: 23406 - protein, 218 aa, Artificial Sequence; identical to SEQ ID NO: 22266
  Description of Artificial Sequence: Synthetic polypeptide
  XENP020504 7G8_H0.52_L0_IgG1_PVA_/S267K Light Chain

SEQ ID NO: 23407 - protein, 111 aa, Artificial Sequence; identical to SEQ ID NO: 22267
  Description of Artificial Sequence: Synthetic polypeptide
  VL of XENP020504

SEQ ID NO: 23408 - protein, 15 aa, Artificial Sequence
  Description of Artificial Sequence: Synthetic peptide
  XENP020504 vlCDR1
KASQSVDYDGDSYMN

SEQ ID NO: 23409 - protein, 7 aa, Artificial Sequence
  Description of Artificial Sequence: Synthetic peptide
  XENP020504 vlCDR2
AASNLES

SEQ ID NO: 23410 - protein, 9 aa, Artificial Sequence
  Description of Artificial Sequence: Synthetic peptide
  XENP020504 vlCDR3
QQSNEDPFT

SEQ ID NO: 23411 - protein, 450 aa, Artificial Sequence
  Description of Artificial Sequence: Synthetic polypeptide
  XENP020505 7G8_H0.53_L0_IgG1_PVA_/S267K Heavy Chain
EVKLEESGGGLVQPGGSMKLSCAASGFTFSDAWMDWVRQSPEKGLEWVAEIRTIANNHATYYAESVKGRFTISRDDSKSSVYLQMNSLRAEDTGIYYCTRLANWDWYFDVWGAGTTVTVSSASTKGPSVFPLAPSSKSTSGGTAALGCLVKDYFPEPVTVSWNSGALTSGVHTFPAVLQSSGLYSLSSVVTVPSSSLGTQTYICNVNHKPSDTKVDKKVEPKSCDKTHTCPPCPAPPVAGPSVFLFPPKPKDTLMISRTPEVTCVVVDVKHEDPEVKFNWYVDGVEVHNAKTKPREEEYNSTYRVVSVLTVLHQDWLNGKEYKCKVSNKALPAPIEKTISKAKGQPREPQVYTLPPSREEMTKNQVSLTCDVSGFYPSDIAVEWESDGQPENNYKTTPPVLDSDGSFFLYSKLTVDKSRWEQGDVFSCSVMHEALHNHYTQKSLSLSPGK

SEQ ID NO: 23412 - protein, 121 aa, Artificial Sequence
  Description of Artificial Sequence: Synthetic polypeptide
  VH of XENP020505
EVKLEESGGGLVQPGGSMKLSCAASGFTFSDAWMDWVRQSPEKGLEWVAEIRTIANNHATYYAESVKGRFTISRDDSKSSVYLQMNSLRAEDTGIYYCTRLANWDWYFDVWGAGTTVTVSS

SEQ ID NO: 23413 - protein, 5 aa, Artificial Sequence
  Description of Artificial Sequence: Synthetic peptide
  XENP020505 vhCDR1
DAWMD

SEQ ID NO: 23414 - protein, 19 aa, Artificial Sequence
  Description of Artificial Sequence: Synthetic peptide
  XENP020505 vhCDR2
EIRTIANNHATYYAESVKG

SEQ ID NO: 23415 - protein, 10 aa, Artificial Sequence
  Description of Artificial Sequence: Synthetic peptide
  XENP020505 vhCDR3
LANWDWYFDV

SEQ ID NO: 23416 - protein, 218 aa, Artificial Sequence; identical to SEQ ID NO: 22266
  Description of Artificial Sequence: Synthetic polypeptide
  XENP020505 7G8_H0.53_L0_IgG1_PVA_/S267K Light Chain

SEQ ID NO: 23417 - protein, 111 aa, Artificial Sequence; identical to SEQ ID NO: 22267
  Description of Artificial Sequence: Synthetic polypeptide
  VL of XENP020505

SEQ ID NO: 23418 - protein, 15 aa, Artificial Sequence
  Description of Artificial Sequence: Synthetic peptide
  XENP020505 vlCDR1
KASQSVDYDGDSYMN

SEQ ID NO: 23419 - protein, 7 aa, Artificial Sequence
  Description of Artificial Sequence: Synthetic peptide
  XENP020505 vlCDR2
AASNLES

SEQ ID NO: 23420 - protein, 9 aa, Artificial Sequence
  Description of Artificial Sequence: Synthetic peptide
  XENP020505 vlCDR3
QQSNEDPFT

SEQ ID NO: 23421 - protein, 450 aa, Artificial Sequence
  Description of Artificial Sequence: Synthetic polypeptide
  XENP020506 7G8_H0.54_L0_IgG1_PVA_/S267K Heavy Chain
EVKLEESGGGLVQPGGSMKLSCAASGFTFSDAWMDWVRQSPEKGLEWVAEIRTKSNNHATYYAESVKGRFTISRDDSKSSVYLQMNSLRAEDTGIYYCTRLANWDWYFDVWGAGTTVTVSSASTKGPSVFPLAPSSKSTSGGTAALGCLVKDYFPEPVTVSWNSGALTSGVHTFPAVLQSSGLYSLSSVVTVPSSSLGTQTYICNVNHKPSDTKVDKKVEPKSCDKTHTCPPCPAPPVAGPSVFLFPPKPKDTLMISRTPEVTCVVVDVKHEDPEVKFNWYVDGVEVHNAKTKPREEEYNSTYRVVSVLTVLHQDWLNGKEYKCKVSNKALPAPIEKTISKAKGQPREPQVYTLPPSREEMTKNQVSLTCDVSGFYPSDIAVEWESDGQPENNYKTTPPVLDSDGSFFLYSKLTVDKSRWEQGDVFSCSVMHEALHNHYTQKSLSLSPGK

SEQ ID NO: 23422 - protein, 121 aa, Artificial Sequence
  Description of Artificial Sequence: Synthetic polypeptide
  VH of XENP020506
EVKLEESGGGLVQPGGSMKLSCAASGFTFSDAWMDWVRQSPEKGLEWVAEIRTKSNNHATYYAESVKGRFTISRDDSKSSVYLQMNSLRAEDTGIYYCTRLANWDWYFDVWGAGTTVTVSS

SEQ ID NO: 23423 - protein, 5 aa, Artificial Sequence
  Description of Artificial Sequence: Synthetic peptide
  XENP020506 vhCDR1
DAWMD

SEQ ID NO: 23424 - protein, 19 aa, Artificial Sequence
  Description of Artificial Sequence: Synthetic peptide
  XENP020506 vhCDR2
EIRTKSNNHATYYAESVKG

SEQ ID NO: 23425 - protein, 10 aa, Artificial Sequence
  Description of Artificial Sequence: Synthetic peptide
  XENP020506 vhCDR3
LANWDWYFDV

SEQ ID NO: 23426 - protein, 218 aa, Artificial Sequence; identical to SEQ ID NO: 22266
  Description of Artificial Sequence: Synthetic polypeptide
  XENP020506 7G8_H0.54_L0_IgG1_PVA_/S267K Light Chain

SEQ ID NO: 23427 - protein, 111 aa, Artificial Sequence; identical to SEQ ID NO: 22267
  Description of Artificial Sequence: Synthetic polypeptide
  VL of XENP020506

SEQ ID NO: 23428 - protein, 15 aa, Artificial Sequence
  Description of Artificial Sequence: Synthetic peptide
  XENP020506 vlCDR1
KASQSVDYDGDSYMN

SEQ ID NO: 23429 - protein, 7 aa, Artificial Sequence
  Description of Artificial Sequence: Synthetic peptide
  XENP020506 vlCDR2
AASNLES

SEQ ID NO: 23430 - protein, 9 aa, Artificial Sequence
  Description of Artificial Sequence: Synthetic peptide
  XENP020506 vlCDR3
QQSNEDPFT

SEQ ID NO: 23431 - protein, 450 aa, Artificial Sequence
  Description of Artificial Sequence: Synthetic polypeptide
  XENP020507 7G8_H0.55_L0_IgG1_PVA_/S267K Heavy Chain
EVKLEESGGGLVQPGGSMKLSCAASGFTFSDAWMDWVRQSPEKGLEWVAEIRTKTNNHATYYAESVKGRFTISRDDSKSSVYLQMNSLRAEDTGIYYCTRLANWDWYFDVWGAGTTVTVSSASTKGPSVFPLAPSSKSTSGGTAALGCLVKDYFPEPVTVSWNSGALTSGVHTFPAVLQSSGLYSLSSVVTVPSSSLGTQTYICNVNHKPSDTKVDKKVEPKSCDKTHTCPPCPAPPVAGPSVFLFPPKPKDTLMISRTPEVTCVVVDVKHEDPEVKFNWYVDGVEVHNAKTKPREEEYNSTYRVVSVLTVLHQDWLNGKEYKCKVSNKALPAPIEKTISKAKGQPREPQVYTLPPSREEMTKNQVSLTCDVSGFYPSDIAVEWESDGQPENNYKTTPPVLDSDGSFFLYSKLTVDKSRWEQGDVFSCSVMHEALHNHYTQKSLSLSPGK

SEQ ID NO: 23432 - protein, 121 aa, Artificial Sequence
  Description of Artificial Sequence: Synthetic polypeptide
  VH of XENP020507
EVKLEESGGGLVQPGGSMKLSCAASGFTFSDAWMDWVRQSPEKGLEWVAEIRTKTNNHATYYAESVKGRFTISRDDSKSSVYLQMNSLRAEDTGIYYCTRLANWDWYFDVWGAGTTVTVSS

SEQ ID NO: 23433 - protein, 5 aa, Artificial Sequence
  Description of Artificial Sequence: Synthetic peptide
  XENP020507 vhCDR1
DAWMD

SEQ ID NO: 23434 - protein, 19 aa, Artificial Sequence
  Description of Artificial Sequence: Synthetic peptide
  XENP020507 vhCDR2
EIRTKTNNHATYYAESVKG

SEQ ID NO: 23435 - protein, 10 aa, Artificial Sequence
  Description of Artificial Sequence: Synthetic peptide
  XENP020507 vhCDR3
LANWDWYFDV

SEQ ID NO: 23436 - protein, 218 aa, Artificial Sequence; identical to SEQ ID NO: 22266
  Description of Artificial Sequence: Synthetic polypeptide
  XENP020507 7G8_H0.55_L0_IgG1_PVA_/S267K Light Chain

SEQ ID NO: 23437 - protein, 111 aa, Artificial Sequence; identical to SEQ ID NO: 22267
  Description of Artificial Sequence: Synthetic polypeptide
  VL of XENP020507

SEQ ID NO: 23438 - protein, 15 aa, Artificial Sequence
  Description of Artificial Sequence: Synthetic peptide
  XENP020507 vlCDR1
KASQSVDYDGDSYMN

SEQ ID NO: 23439 - protein, 7 aa, Artificial Sequence
  Description of Artificial Sequence: Synthetic peptide
  XENP020507 vlCDR2
AASNLES

SEQ ID NO: 23440 - protein, 9 aa, Artificial Sequence
  Description of Artificial Sequence: Synthetic peptide
  XENP020507 vlCDR3
QQSNEDPFT

SEQ ID NO: 23441 - protein, 450 aa, Artificial Sequence
  Description of Artificial Sequence: Synthetic polypeptide
  XENP020508 7G8_H0.56_L0_IgG1_PVA_/S267K Heavy Chain
EVKLEESGGGLVQPGGSMKLSCAASGFTFSDAWMDWVRQSPEKGLEWVAEIRTKGNNHATYYAESVKGRFTISRDDSKSSVYLQMNSLRAEDTGIYYCTRLANWDWYFDVWGAGTTVTVSSASTKGPSVFPLAPSSKSTSGGTAALGCLVKDYFPEPVTVSWNSGALTSGVHTFPAVLQSSGLYSLSSVVTVPSSSLGTQTYICNVNHKPSDTKVDKKVEPKSCDKTHTCPPCPAPPVAGPSVFLFPPKPKDTLMISRTPEVTCVVVDVKHEDPEVKFNWYVDGVEVHNAKTKPREEEYNSTYRVVSVLTVLHQDWLNGKEYKCKVSNKALPAPIEKTISKAKGQPREPQVYTLPPSREEMTKNQVSLTCDVSGFYPSDIAVEWESDGQPENNYKTTPPVLDSDGSFFLYSKLTVDKSRWEQGDVFSCSVMHEALHNHYTQKSLSLSPGK

SEQ ID NO: 23442 - protein, 121 aa, Artificial Sequence
  Description of Artificial Sequence: Synthetic polypeptide
  VH of XENP020508
EVKLEESGGGLVQPGGSMKLSCAASGFTFSDAWMDWVRQSPEKGLEWVAEIRTKGNNHATYYAESVKGRFTISRDDSKSSVYLQMNSLRAEDTGIYYCTRLANWDWYFDVWGAGTTVTVSS

SEQ ID NO: 23443 - protein, 5 aa, Artificial Sequence
  Description of Artificial Sequence: Synthetic peptide
  XENP020508 vhCDR1
DAWMD

SEQ ID NO: 23444 - protein, 19 aa, Artificial Sequence
  Description of Artificial Sequence: Synthetic peptide
  XENP020508 vhCDR2
EIRTKGNNHATYYAESVKG

SEQ ID NO: 23445 - protein, 10 aa, Artificial Sequence
  Description of Artificial Sequence: Synthetic peptide
  XENP020508 vhCDR3
LANWDWYFDV

SEQ ID NO: 23446 - protein, 218 aa, Artificial Sequence; identical to SEQ ID NO: 22266
  Description of Artificial Sequence: Synthetic polypeptide
  XENP020508 7G8_H0.56_L0_IgG1_PVA_/S267K Light Chain

SEQ ID NO: 23447 - protein, 111 aa, Artificial Sequence; identical to SEQ ID NO: 22267
  Description of Artificial Sequence: Synthetic polypeptide
  VL of XENP020508

SEQ ID NO: 23448 - protein, 15 aa, Artificial Sequence
  Description of Artificial Sequence: Synthetic peptide
  XENP020508 vlCDR1
KASQSVDYDGDSYMN

SEQ ID NO: 23449 - protein, 7 aa, Artificial Sequence
  Description of Artificial Sequence: Synthetic peptide
  XENP020508 vlCDR2
AASNLES

SEQ ID NO: 23450 - protein, 9 aa, Artificial Sequence
  Description of Artificial Sequence: Synthetic peptide
  XENP020508 vlCDR3
QQSNEDPFT

SEQ ID NO: 23451 - protein, 450 aa, Artificial Sequence
  Description of Artificial Sequence: Synthetic polypeptide
  XENP020509 7G8_H0.57_L0_IgG1_PVA_/S267K Heavy Chain
EVKLEESGGGLVQPGGSMKLSCAASGFTFSDAWMDWVRQSPEKGLEWVAEIRTKHNNHATYYAESVKGRFTISRDDSKSSVYLQMNSLRAEDTGIYYCTRLANWDWYFDVWGAGTTVTVSSASTKGPSVFPLAPSSKSTSGGTAALGCLVKDYFPEPVTVSWNSGALTSGVHTFPAVLQSSGLYSLSSVVTVPSSSLGTQTYICNVNHKPSDTKVDKKVEPKSCDKTHTCPPCPAPPVAGPSVFLFPPKPKDTLMISRTPEVTCVVVDVKHEDPEVKFNWYVDGVEVHNAKTKPREEEYNSTYRVVSVLTVLHQDWLNGKEYKCKVSNKALPAPIEKTISKAKGQPREPQVYTLPPSREEMTKNQVSLTCDVSGFYPSDIAVEWESDGQPENNYKTTPPVLDSDGSFFLYSKLTVDKSRWEQGDVFSCSVMHEALHNHYTQKSLSLSPGK

SEQ ID NO: 23452 - protein, 121 aa, Artificial Sequence
  Description of Artificial Sequence: Synthetic polypeptide
  VH of XENP020509
EVKLEESGGGLVQPGGSMKLSCAASGFTFSDAWMDWVRQSPEKGLEWVAEIRTKHNNHATYYAESVKGRFTISRDDSKSSVYLQMNSLRAEDTGIYYCTRLANWDWYFDVWGAGTTVTVSS

SEQ ID NO: 23453 - protein, 5 aa, Artificial Sequence
  Description of Artificial Sequence: Synthetic peptide
  XENP020509 vhCDR1
DAWMD

SEQ ID NO: 23454 - protein, 19 aa, Artificial Sequence
  Description of Artificial Sequence: Synthetic peptide
  XENP020509 vhCDR2
EIRTKHNNHATYYAESVKG

SEQ ID NO: 23455 - protein, 10 aa, Artificial Sequence
  Description of Artificial Sequence: Synthetic peptide
  XENP020509 vhCDR3
LANWDWYFDV

SEQ ID NO: 23456 - protein, 218 aa, Artificial Sequence; identical to SEQ ID NO: 22266
  Description of Artificial Sequence: Synthetic polypeptide
  XENP020509 7G8_H0.57_L0_IgG1_PVA_/S267K Light Chain

SEQ ID NO: 23457 - protein, 111 aa, Artificial Sequence; identical to SEQ ID NO: 22267
  Description of Artificial Sequence: Synthetic polypeptide
  VL of XENP020509

SEQ ID NO: 23458 - protein, 15 aa, Artificial Sequence
  Description of Artificial Sequence: Synthetic peptide
  XENP020509 vlCDR1
KASQSVDYDGDSYMN

SEQ ID NO: 23459 - protein, 7 aa, Artificial Sequence
  Description of Artificial Sequence: Synthetic peptide
  XENP020509 vlCDR2
AASNLES

SEQ ID NO: 23460 - protein, 9 aa, Artificial Sequence
  Description of Artificial Sequence: Synthetic peptide
  XENP020509 vlCDR3
QQSNEDPFT

SEQ ID NO: 23461 - protein, 450 aa, Artificial Sequence
  Description of Artificial Sequence: Synthetic polypeptide
  XENP020510 7G8_H0.58_L0_IgG1_PVA_/S267K Heavy Chain
EVKLEESGGGLVQPGGSMKLSCAASGFTFSDAWMDWVRQSPEKGLEWVAEIRTKQNNHATYYAESVKGRFTISRDDSKSSVYLQMNSLRAEDTGIYYCTRLANWDWYFDVWGAGTTVTVSSASTKGPSVFPLAPSSKSTSGGTAALGCLVKDYFPEPVTVSWNSGALTSGVHTFPAVLQSSGLYSLSSVVTVPSSSLGTQTYICNVNHKPSDTKVDKKVEPKSCDKTHTCPPCPAPPVAGPSVFLFPPKPKDTLMISRTPEVTCVVVDVKHEDPEVKFNWYVDGVEVHNAKTKPREEEYNSTYRVVSVLTVLHQDWLNGKEYKCKVSNKALPAPIEKTISKAKGQPREPQVYTLPPSREEMTKNQVSLTCDVSGFYPSDIAVEWESDGQPENNYKTTPPVLDSDGSFFLYSKLTVDKSRWEQGDVFSCSVMHEALHNHYTQKSLSLSPGK

SEQ ID NO: 23462 - protein, 121 aa, Artificial Sequence
  Description of Artificial Sequence: Synthetic polypeptide
  VH of XENP020510
EVKLEESGGGLVQPGGSMKLSCAASGFTFSDAWMDWVRQSPEKGLEWVAEIRTKQNNHATYYAESVKGRFTISRDDSKSSVYLQMNSLRAEDTGIYYCTRLANWDWYFDVWGAGTTVTVSS

SEQ ID NO: 23463 - protein, 5 aa, Artificial Sequence
  Description of Artificial Sequence: Synthetic peptide
  XENP020510 vhCDR1
DAWMD

SEQ ID NO: 23464 - protein, 19 aa, Artificial Sequence
  Description of Artificial Sequence: Synthetic peptide
  XENP020510 vhCDR2
EIRTKQNNHATYYAESVKG

SEQ ID NO: 23465 - protein, 10 aa, Artificial Sequence
  Description of Artificial Sequence: Synthetic peptide
  XENP020510 vhCDR3
LANWDWYFDV

SEQ ID NO: 23466 - protein, 218 aa, Artificial Sequence; identical to SEQ ID NO: 22266
  Description of Artificial Sequence: Synthetic polypeptide
  XENP020510 7G8_H0.58_L0_IgG1_PVA_/S267K Light Chain

SEQ ID NO: 23467 - protein, 111 aa, Artificial Sequence; identical to SEQ ID NO: 22267
  Description of Artificial Sequence: Synthetic polypeptide
  VL of XENP020510

SEQ ID NO: 23468 - protein, 15 aa, Artificial Sequence
  Description of Artificial Sequence: Synthetic peptide
  XENP020510 vlCDR1
KASQSVDYDGDSYMN

SEQ ID NO: 23469 - protein, 7 aa, Artificial Sequence
  Description of Artificial Sequence: Synthetic peptide
  XENP020510 vlCDR2
AASNLES

SEQ ID NO: 23470 - protein, 9 aa, Artificial Sequence
  Description of Artificial Sequence: Synthetic peptide
  XENP020510 vlCDR3
QQSNEDPFT

SEQ ID NO: 23471 - protein, 450 aa, Artificial Sequence
  Description of Artificial Sequence: Synthetic polypeptide
  XENP020511 7G8_H0.59_L0_IgG1_PVA_/S267K Heavy Chain
EVKLEESGGGLVQPGGSMKLSCAASGFTFSDAWMDWVRQSPEKGLEWVAEIRTKDNNHATYYAESVKGRFTISRDDSKSSVYLQMNSLRAEDTGIYYCTRLANWDWYFDVWGAGTTVTVSSASTKGPSVFPLAPSSKSTSGGTAALGCLVKDYFPEPVTVSWNSGALTSGVHTFPAVLQSSGLYSLSSVVTVPSSSLGTQTYICNVNHKPSDTKVDKKVEPKSCDKTHTCPPCPAPPVAGPSVFLFPPKPKDTLMISRTPEVTCVVVDVKHEDPEVKFNWYVDGVEVHNAKTKPREEEYNSTYRVVSVLTVLHQDWLNGKEYKCKVSNKALPAPIEKTISKAKGQPREPQVYTLPPSREEMTKNQVSLTCDVSGFYPSDIAVEWESDGQPENNYKTTPPVLDSDGSFFLYSKLTVDKSRWEQGDVFSCSVMHEALHNHYTQKSLSLSPGK

SEQ ID NO: 23472 - protein, 121 aa, Artificial Sequence
  Description of Artificial Sequence: Synthetic polypeptide
  VH of XENP020511
EVKLEESGGGLVQPGGSMKLSCAASGFTFSDAWMDWVRQSPEKGLEWVAEIRTKDNNHATYYAESVKGRFTISRDDSKSSVYLQMNSLRAEDTGIYYCTRLANWDWYFDVWGAGTTVTVSS

SEQ ID NO: 23473 - protein, 5 aa, Artificial Sequence
  Description of Artificial Sequence: Synthetic peptide
  XENP020511 vhCDR1
DAWMD

SEQ ID NO: 23474 - protein, 19 aa, Artificial Sequence
  Description of Artificial Sequence: Synthetic peptide
  XENP020511 vhCDR2
EIRTKDNNHATYYAESVKG

SEQ ID NO: 23475 - protein, 10 aa, Artificial Sequence
  Description of Artificial Sequence: Synthetic peptide
  XENP020511 vhCDR3
LANWDWYFDV

SEQ ID NO: 23476 - protein, 218 aa, Artificial Sequence; identical to SEQ ID NO: 22266
  Description of Artificial Sequence: Synthetic polypeptide
  XENP020511 7G8_H0.59_L0_IgG1_PVA_/S267K Light Chain

SEQ ID NO: 23477 - protein, 111 aa, Artificial Sequence; identical to SEQ ID NO: 22267
  Description of Artificial Sequence: Synthetic polypeptide
  VL of XENP020511

SEQ ID NO: 23478 - protein, 15 aa, Artificial Sequence
  Description of Artificial Sequence: Synthetic peptide
  XENP020511 vlCDR1
KASQSVDYDGDSYMN

SEQ ID NO: 23479 - protein, 7 aa, Artificial Sequence
  Description of Artificial Sequence: Synthetic peptide
  XENP020511 vlCDR2
AASNLES

SEQ ID NO: 23480 - protein, 9 aa, Artificial Sequence
  Description of Artificial Sequence: Synthetic peptide
  XENP020511 vlCDR3
QQSNEDPFT

SEQ ID NO: 23481 - protein, 450 aa, Artificial Sequence
  Description of Artificial Sequence: Synthetic polypeptide
  XENP020512 7G8_H0.60_L0_IgG1_PVA_/S267K Heavy Chain
EVKLEESGGGLVQPGGSMKLSCAASGFTFSDAWMDWVRQSPEKGLEWVAEIRTKLNNHATYYAESVKGRFTISRDDSKSSVYLQMNSLRAEDTGIYYCTRLANWDWYFDVWGAGTTVTVSSASTKGPSVFPLAPSSKSTSGGTAALGCLVKDYFPEPVTVSWNSGALTSGVHTFPAVLQSSGLYSLSSVVTVPSSSLGTQTYICNVNHKPSDTKVDKKVEPKSCDKTHTCPPCPAPPVAGPSVFLFPPKPKDTLMISRTPEVTCVVVDVKHEDPEVKFNWYVDGVEVHNAKTKPREEEYNSTYRVVSVLTVLHQDWLNGKEYKCKVSNKALPAPIEKTISKAKGQPREPQVYTLPPSREEMTKNQVSLTCDVSGFYPSDIAVEWESDGQPENNYKTTPPVLDSDGSFFLYSKLTVDKSRWEQGDVFSCSVMHEALHNHYTQKSLSLSPGK

SEQ ID NO: 23482 - protein, 121 aa, Artificial Sequence
  Description of Artificial Sequence: Synthetic polypeptide
  VH of XENP020512
EVKLEESGGGLVQPGGSMKLSCAASGFTFSDAWMDWVRQSPEKGLEWVAEIRTKLNNHATYYAESVKGRFTISRDDSKSSVYLQMNSLRAEDTGIYYCTRLANWDWYFDVWGAGTTVTVSS

SEQ ID NO: 23483 - protein, 5 aa, Artificial Sequence
  Description of Artificial Sequence: Synthetic peptide
  XENP020512 vhCDR1
DAWMD

SEQ ID NO: 23484 - protein, 19 aa, Artificial Sequence
  Description of Artificial Sequence: Synthetic peptide
  XENP020512 vhCDR2
EIRTKLNNHATYYAESVKG

SEQ ID NO: 23485 - protein, 10 aa, Artificial Sequence
  Description of Artificial Sequence: Synthetic peptide
  XENP020512 vhCDR3
LANWDWYFDV

SEQ ID NO: 23486 - protein, 218 aa, Artificial Sequence; identical to SEQ ID NO: 22266
  Description of Artificial Sequence: Synthetic polypeptide
  XENP020512 7G8_H0.60_L0_IgG1_PVA_/S267K Light Chain

SEQ ID NO: 23487 - protein, 111 aa, Artificial Sequence; identical to SEQ ID NO: 22267
  Description of Artificial Sequence: Synthetic polypeptide
  VL of XENP020512

SEQ ID NO: 23488 - protein, 15 aa, Artificial Sequence
  Description of Artificial Sequence: Synthetic peptide
  XENP020512 vlCDR1
KASQSVDYDGDSYMN

SEQ ID NO: 23489 - protein, 7 aa, Artificial Sequence
  Description of Artificial Sequence: Synthetic peptide
  XENP020512 vlCDR2
AASNLES

SEQ ID NO: 23490 - protein, 9 aa, Artificial Sequence
  Description of Artificial Sequence: Synthetic peptide
  XENP020512 vlCDR3
QQSNEDPFT

SEQ ID NO: 23491 - protein, 450 aa, Artificial Sequence
  Description of Artificial Sequence: Synthetic polypeptide
  XENP020513 7G8_H0.61_L0_IgG1_PVA_/S267K Heavy Chain
EVKLEESGGGLVQPGGSMKLSCAASGFTFSDAWMDWVRQSPEKGLEWVAEIRTKKNNHATYYAESVKGRFTISRDDSKSSVYLQMNSLRAEDTGIYYCTRLANWDWYFDVWGAGTTVTVSSASTKGPSVFPLAPSSKSTSGGTAALGCLVKDYFPEPVTVSWNSGALTSGVHTFPAVLQSSGLYSLSSVVTVPSSSLGTQTYICNVNHKPSDTKVDKKVEPKSCDKTHTCPPCPAPPVAGPSVFLFPPKPKDTLMISRTPEVTCVVVDVKHEDPEVKFNWYVDGVEVHNAKTKPREEEYNSTYRVVSVLTVLHQDWLNGKEYKCKVSNKALPAPIEKTISKAKGQPREPQVYTLPPSREEMTKNQVSLTCDVSGFYPSDIAVEWESDGQPENNYKTTPPVLDSDGSFFLYSKLTVDKSRWEQGDVFSCSVMHEALHNHYTQKSLSLSPGK

SEQ ID NO: 23492 - protein, 121 aa, Artificial Sequence
  Description of Artificial Sequence: Synthetic polypeptide
  VH of XENP020513
EVKLEESGGGLVQPGGSMKLSCAASGFTFSDAWMDWVRQSPEKGLEWVAEIRTKKNNHATYYAESVKGRFTISRDDSKSSVYLQMNSLRAEDTGIYYCTRLANWDWYFDVWGAGTTVTVSS

SEQ ID NO: 23493 - protein, 5 aa, Artificial Sequence
  Description of Artificial Sequence: Synthetic peptide
  XENP020513 vhCDR1
DAWMD

SEQ ID NO: 23494 - protein, 19 aa, Artificial Sequence
  Description of Artificial Sequence: Synthetic peptide
  XENP020513 vhCDR2
EIRTKKNNHATYYAESVKG

SEQ ID NO: 23495 - protein, 10 aa, Artificial Sequence
  Description of Artificial Sequence: Synthetic peptide
  XENP020513 vhCDR3
LANWDWYFDV

SEQ ID NO: 23496 - protein, 218 aa, Artificial Sequence; identical to SEQ ID NO: 22266
  Description of Artificial Sequence: Synthetic polypeptide
  XENP020513 7G8_H0.61_L0_IgG1_PVA_/S267K Light Chain

SEQ ID NO: 23497 - protein, 111 aa, Artificial Sequence; identical to SEQ ID NO: 22267
  Description of Artificial Sequence: Synthetic polypeptide
  VL of XENP020513

SEQ ID NO: 23498 - protein, 15 aa, Artificial Sequence
  Description of Artificial Sequence: Synthetic peptide
  XENP020513 vlCDR1
KASQSVDYDGDSYMN

SEQ ID NO: 23499 - protein, 7 aa, Artificial Sequence
  Description of Artificial Sequence: Synthetic peptide
  XENP020513 vlCDR2
AASNLES

SEQ ID NO: 23500 - protein, 9 aa, Artificial Sequence
  Description of Artificial Sequence: Synthetic peptide
  XENP020513 vlCDR3
QQSNEDPFT

SEQ ID NO: 23501 - protein, 450 aa, Artificial Sequence
  Description of Artificial Sequence: Synthetic polypeptide
  XENP020514 7G8_H0.62_L0_IgG1_PVA_/S267K Heavy Chain
EVKLEESGGGLVQPGGSMKLSCAASGFTFSDAWMDWVRQSPEKGLEWVAEIRTKYNNHATYYAESVKGRFTISRDDSKSSVYLQMNSLRAEDTGIYYCTRLANWDWYFDVWGAGTTVTVSSASTKGPSVFPLAPSSKSTSGGTAALGCLVKDYFPEPVTVSWNSGALTSGVHTFPAVLQSSGLYSLSSVVTVPSSSLGTQTYICNVNHKPSDTKVDKKVEPKSCDKTHTCPPCPAPPVAGPSVFLFPPKPKDTLMISRTPEVTCVVVDVKHEDPEVKFNWYVDGVEVHNAKTKPREEEYNSTYRVVSVLTVLHQDWLNGKEYKCKVSNKALPAPIEKTISKAKGQPREPQVYTLPPSREEMTKNQVSLTCDVSGFYPSDIAVEWESDGQPENNYKTTPPVLDSDGSFFLYSKLTVDKSRWEQGDVFSCSVMHEALHNHYTQKSLSLSPGK

SEQ ID NO: 23502 - protein, 121 aa, Artificial Sequence
  Description of Artificial Sequence: Synthetic polypeptide
  VH of XENP020514
EVKLEESGGGLVQPGGSMKLSCAASGFTFSDAWMDWVRQSPEKGLEWVAEIRTKYNNHATYYAESVKGRFTISRDDSKSSVYLQMNSLRAEDTGIYYCTRLANWDWYFDVWGAGTTVTVSS

SEQ ID NO: 23503 - protein, 5 aa, Artificial Sequence
  Description of Artificial Sequence: Synthetic peptide
  XENP020514 vhCDR1
DAWMD

SEQ ID NO: 23504 - protein, 19 aa, Artificial Sequence
  Description of Artificial Sequence: Synthetic peptide
  XENP020514 vhCDR2
EIRTKYNNHATYYAESVKG

SEQ ID NO: 23505 - protein, 10 aa, Artificial Sequence
  Description of Artificial Sequence: Synthetic peptide
  XENP020514 vhCDR3
LANWDWYFDV

SEQ ID NO: 23506 - protein, 218 aa, Artificial Sequence; identical to SEQ ID NO: 22266
  Description of Artificial Sequence: Synthetic polypeptide
  XENP020514 7G8_H0.62_L0_IgG1_PVA_/S267K Light Chain

SEQ ID NO: 23507 - protein, 111 aa, Artificial Sequence; identical to SEQ ID NO: 22267
  Description of Artificial Sequence: Synthetic polypeptide
  VL of XENP020514

SEQ ID NO: 23508 - protein, 15 aa, Artificial Sequence
  Description of Artificial Sequence: Synthetic peptide
  XENP020514 vlCDR1
KASQSVDYDGDSYMN

SEQ ID NO: 23509 - protein, 7 aa, Artificial Sequence
  Description of Artificial Sequence: Synthetic peptide
  XENP020514 vlCDR2
AASNLES

SEQ ID NO: 23510 - protein, 9 aa, Artificial Sequence
  Description of Artificial Sequence: Synthetic peptide
  XENP020514 vlCDR3
QQSNEDPFT

SEQ ID NO: 23511 - protein, 450 aa, Artificial Sequence
  Description of Artificial Sequence: Synthetic polypeptide
  XENP020515 7G8_H0.63_L0_IgG1_PVA_/S267K Heavy Chain
EVKLEESGGGLVQPGGSMKLSCAASGFTFSDAWMDWVRQSPEKGLEWVAEIRTKADNHATYYAESVKGRFTISRDDSKSSVYLQMNSLRAEDTGIYYCTRLANWDWYFDVWGAGTTVTVSSASTKGPSVFPLAPSSKSTSGGTAALGCLVKDYFPEPVTVSWNSGALTSGVHTFPAVLQSSGLYSLSSVVTVPSSSLGTQTYICNVNHKPSDTKVDKKVEPKSCDKTHTCPPCPAPPVAGPSVFLFPPKPKDTLMISRTPEVTCVVVDVKHEDPEVKFNWYVDGVEVHNAKTKPREEEYNSTYRVVSVLTVLHQDWLNGKEYKCKVSNKALPAPIEKTISKAKGQPREPQVYTLPPSREEMTKNQVSLTCDVSGFYPSDIAVEWESDGQPENNYKTTPPVLDSDGSFFLYSKLTVDKSRWEQGDVFSCSVMHEALHNHYTQKSLSLSPGK

SEQ ID NO: 23512 - protein, 121 aa, Artificial Sequence
  Description of Artificial Sequence: Synthetic polypeptide
  VH of XENP020515
EVKLEESGGGLVQPGGSMKLSCAASGFTFSDAWMDWVRQSPEKGLEWVAEIRTKADNHATYYAESVKGRFTISRDDSKSSVYLQMNSLRAEDTGIYYCTRLANWDWYFDVWGAGTTVTVSS

SEQ ID NO: 23513 - protein, 5 aa, Artificial Sequence
  Description of Artificial Sequence: Synthetic peptide
  XENP020515 vhCDR1
DAWMD

SEQ ID NO: 23514 - protein, 19 aa, Artificial Sequence
  Description of Artificial Sequence: Synthetic peptide
  XENP020515 vhCDR2
EIRTKADNHATYYAESVKG

SEQ ID NO: 23515 - protein, 10 aa, Artificial Sequence
  Description of Artificial Sequence: Synthetic peptide
  XENP020515 vhCDR3
LANWDWYFDV

SEQ ID NO: 23516 - protein, 218 aa, Artificial Sequence; identical to SEQ ID NO: 22266
  Description of Artificial Sequence: Synthetic polypeptide
  XENP020515 7G8_H0.63_L0_IgG1_PVA_/S267K Light Chain

SEQ ID NO: 23517 - protein, 111 aa, Artificial Sequence; identical to SEQ ID NO: 22267
  Description of Artificial Sequence: Synthetic polypeptide
  VL of XENP020515

SEQ ID NO: 23518 - protein, 15 aa, Artificial Sequence
  Description of Artificial Sequence: Synthetic peptide
  XENP020515 vlCDR1
KASQSVDYDGDSYMN

SEQ ID NO: 23519 - protein, 7 aa, Artificial Sequence
  Description of Artificial Sequence: Synthetic peptide
  XENP020515 vlCDR2
AASNLES

SEQ ID NO: 23520 - protein, 9 aa, Artificial Sequence
  Description of Artificial Sequence: Synthetic peptide
  XENP020515 vlCDR3
QQSNEDPFT

SEQ ID NO: 23521 - protein, 450 aa, Artificial Sequence
  Description of Artificial Sequence: Synthetic polypeptide
  XENP020516 7G8_H0.64_L0_IgG1_PVA_/S267K Heavy Chain
EVKLEESGGGLVQPGGSMKLSCAASGFTFSDAWMDWVRQSPEKGLEWVAEIRTKAHNHATYYAESVKGRFTISRDDSKSSVYLQMNSLRAEDTGIYYCTRLANWDWYFDVWGAGTTVTVSSASTKGPSVFPLAPSSKSTSGGTAALGCLVKDYFPEPVTVSWNSGALTSGVHTFPAVLQSSGLYSLSSVVTVPSSSLGTQTYICNVNHKPSDTKVDKKVEPKSCDKTHTCPPCPAPPVAGPSVFLFPPKPKDTLMISRTPEVTCVVVDVKHEDPEVKFNWYVDGVEVHNAKTKPREEEYNSTYRVVSVLTVLHQDWLNGKEYKCKVSNKALPAPIEKTISKAKGQPREPQVYTLPPSREEMTKNQVSLTCDVSGFYPSDIAVEWESDGQPENNYKTTPPVLDSDGSFFLYSKLTVDKSRWEQGDVFSCSVMHEALHNHYTQKSLSLSPGK

SEQ ID NO: 23522 - protein, 121 aa, Artificial Sequence
  Description of Artificial Sequence: Synthetic polypeptide
  VH of XENP020516
EVKLEESGGGLVQPGGSMKLSCAASGFTFSDAWMDWVRQSPEKGLEWVAEIRTKAHNHATYYAESVKGRFTISRDDSKSSVYLQMNSLRAEDTGIYYCTRLANWDWYFDVWGAGTTVTVSS

SEQ ID NO: 23523 - protein, 5 aa, Artificial Sequence
  Description of Artificial Sequence: Synthetic peptide
  XENP020516 vhCDR1
DAWMD

SEQ ID NO: 23524 - protein, 19 aa, Artificial Sequence
  Description of Artificial Sequence: Synthetic peptide
  XENP020516 vhCDR2
EIRTKAHNHATYYAESVKG

SEQ ID NO: 23525 - protein, 10 aa, Artificial Sequence
  Description of Artificial Sequence: Synthetic peptide
  XENP020516 vhCDR3
LANWDWYFDV

SEQ ID NO: 23526 - protein, 218 aa, Artificial Sequence; identical to SEQ ID NO: 22266
  Description of Artificial Sequence: Synthetic polypeptide
  XENP020516 7G8_H0.64_L0_IgG1_PVA_/S267K Light Chain

SEQ ID NO: 23527 - protein, 111 aa, Artificial Sequence; identical to SEQ ID NO: 22267
  Description of Artificial Sequence: Synthetic polypeptide
  VL of XENP020516

SEQ ID NO: 23528 - protein, 15 aa, Artificial Sequence
  Description of Artificial Sequence: Synthetic peptide
  XENP020516 vlCDR1
KASQSVDYDGDSYMN

SEQ ID NO: 23529 - protein, 7 aa, Artificial Sequence
  Description of Artificial Sequence: Synthetic peptide
  XENP020516 vlCDR2
AASNLES

SEQ ID NO: 23530 - protein, 9 aa, Artificial Sequence
  Description of Artificial Sequence: Synthetic peptide
  XENP020516 vlCDR3
QQSNEDPFT

SEQ ID NO: 23531 - protein, 450 aa, Artificial Sequence
  Description of Artificial Sequence: Synthetic polypeptide
  XENP020517 7G8_H0.65_L0_IgG1_PVA_/S267K Heavy Chain
EVKLEESGGGLVQPGGSMKLSCAASGFTFSDAWMDWVRQSPEKGLEWVAEIRTKAENHATYYAESVKGRFTISRDDSKSSVYLQMNSLRAEDTGIYYCTRLANWDWYFDVWGAGTTVTVSSASTKGPSVFPLAPSSKSTSGGTAALGCLVKDYFPEPVTVSWNSGALTSGVHTFPAVLQSSGLYSLSSVVTVPSSSLGTQTYICNVNHKPSDTKVDKKVEPKSCDKTHTCPPCPAPPVAGPSVFLFPPKPKDTLMISRTPEVTCVVVDVKHEDPEVKFNWYVDGVEVHNAKTKPREEEYNSTYRVVSVLTVLHQDWLNGKEYKCKVSNKALPAPIEKTISKAKGQPREPQVYTLPPSREEMTKNQVSLTCDVSGFYPSDIAVEWESDGQPENNYKTTPPVLDSDGSFFLYSKLTVDKSRWEQGDVFSCSVMHEALHNHYTQKSLSLSPGK

SEQ ID NO: 23532 - protein, 121 aa, Artificial Sequence
  Description of Artificial Sequence: Synthetic polypeptide
  VH of XENP020517
EVKLEESGGGLVQPGGSMKLSCAASGFTFSDAWMDWVRQSPEKGLEWVAEIRTKAENHATYYAESVKGRFTISRDDSKSSVYLQMNSLRAEDTGIYYCTRLANWDWYFDVWGAGTTVTVSS

SEQ ID NO: 23533 - protein, 5 aa, Artificial Sequence
  Description of Artificial Sequence: Synthetic peptide
  XENP020517 vhCDR1
DAWMD

SEQ ID NO: 23534 - protein, 19 aa, Artificial Sequence
  Description of Artificial Sequence: Synthetic peptide
  XENP020517 vhCDR2
EIRTKAENHATYYAESVKG

SEQ ID NO: 23535 - protein, 10 aa, Artificial Sequence
  Description of Artificial Sequence: Synthetic peptide
  XENP020517 vhCDR3
LANWDWYFDV

SEQ ID NO: 23536 - protein, 218 aa, Artificial Sequence; identical to SEQ ID NO: 22266
  Description of Artificial Sequence: Synthetic polypeptide
  XENP020517 7G8_H0.65_L0_IgG1_PVA_/S267K Light Chain

SEQ ID NO: 23537 - protein, 111 aa, Artificial Sequence; identical to SEQ ID NO: 22267
  Description of Artificial Sequence: Synthetic polypeptide
  VL of XENP020517

SEQ ID NO: 23538 - protein, 15 aa, Artificial Sequence
  Description of Artificial Sequence: Synthetic peptide
  XENP020517 vlCDR1
KASQSVDYDGDSYMN

SEQ ID NO: 23539 - protein, 7 aa, Artificial Sequence
  Description of Artificial Sequence: Synthetic peptide
  XENP020517 vlCDR2
AASNLES

SEQ ID NO: 23540 - protein, 9 aa, Artificial Sequence
  Description of Artificial Sequence: Synthetic peptide
  XENP020517 vlCDR3
QQSNEDPFT

SEQ ID NO: 23541 - protein, 450 aa, Artificial Sequence
  Description of Artificial Sequence: Synthetic polypeptide
  XENP020518 7G8_H0.66_L0_IgG1_PVA_/S267K Heavy Chain
EVKLEESGGGLVQPGGSMKLSCAASGFTFSDAWMDWVRQSPEKGLEWVAEIRTKASNHATYYAESVKGRFTISRDDSKSSVYLQMNSLRAEDTGIYYCTRLANWDWYFDVWGAGTTVTVSSASTKGPSVFPLAPSSKSTSGGTAALGCLVKDYFPEPVTVSWNSGALTSGVHTFPAVLQSSGLYSLSSVVTVPSSSLGTQTYICNVNHKPSDTKVDKKVEPKSCDKTHTCPPCPAPPVAGPSVFLFPPKPKDTLMISRTPEVTCVVVDVKHEDPEVKFNWYVDGVEVHNAKTKPREEEYNSTYRVVSVLTVLHQDWLNGKEYKCKVSNKALPAPIEKTISKAKGQPREPQVYTLPPSREEMTKNQVSLTCDVSGFYPSDIAVEWESDGQPENNYKTTPPVLDSDGSFFLYSKLTVDKSRWEQGDVFSCSVMHEALHNHYTQKSLSLSPGK

SEQ ID NO: 23542 - protein, 121 aa, Artificial Sequence
  Description of Artificial Sequence: Synthetic polypeptide
  VH of XENP020518
EVKLEESGGGLVQPGGSMKLSCAASGFTFSDAWMDWVRQSPEKGLEWVAEIRTKASNHATYYAESVKGRFTISRDDSKSSVYLQMNSLRAEDTGIYYCTRLANWDWYFDVWGAGTTVTVSS

SEQ ID NO: 23543 - protein, 5 aa, Artificial Sequence
  Description of Artificial Sequence: Synthetic peptide
  XENP020518 vhCDR1
DAWMD

SEQ ID NO: 23544 - protein, 19 aa, Artificial Sequence
  Description of Artificial Sequence: Synthetic peptide
  XENP020518 vhCDR2
EIRTKASNHATYYAESVKG

SEQ ID NO: 23545 - protein, 10 aa, Artificial Sequence
  Description of Artificial Sequence: Synthetic peptide
  XENP020518 vhCDR3
LANWDWYFDV

SEQ ID NO: 23546 - protein, 218 aa, Artificial Sequence; identical to SEQ ID NO: 22266
  Description of Artificial Sequence: Synthetic polypeptide
  XENP020518 7G8_H0.66_L0_IgG1_PVA_/S267K Light Chain

SEQ ID NO: 23547 - protein, 111 aa, Artificial Sequence; identical to SEQ ID NO: 22267
  Description of Artificial Sequence: Synthetic polypeptide
  VL of XENP020518

SEQ ID NO: 23548 - protein, 15 aa, Artificial Sequence
  Description of Artificial Sequence: Synthetic peptide
  XENP020518 vlCDR1
KASQSVDYDGDSYMN

SEQ ID NO: 23549 - protein, 7 aa, Artificial Sequence
  Description of Artificial Sequence: Synthetic peptide
  XENP020518 vlCDR2
AASNLES

SEQ ID NO: 23550 - protein, 9 aa, Artificial Sequence
  Description of Artificial Sequence: Synthetic peptide
  XENP020518 vlCDR3
QQSNEDPFT

SEQ ID NO: 23551 - protein, 450 aa, Artificial Sequence
  Description of Artificial Sequence: Synthetic polypeptide
  XENP020519 7G8_H0.67_L0_IgG1_PVA_/S267K Heavy Chain
EVKLEESGGGLVQPGGSMKLSCAASGFTFSDAWMDWVRQSPEKGLEWVAEIRTKARNHATYYAESVKGRFTISRDDSKSSVYLQMNSLRAEDTGIYYCTRLANWDWYFDVWGAGTTVTVSSASTKGPSVFPLAPSSKSTSGGTAALGCLVKDYFPEPVTVSWNSGALTSGVHTFPAVLQSSGLYSLSSVVTVPSSSLGTQTYICNVNHKPSDTKVDKKVEPKSCDKTHTCPPCPAPPVAGPSVFLFPPKPKDTLMISRTPEVTCVVVDVKHEDPEVKFNWYVDGVEVHNAKTKPREEEYNSTYRVVSVLTVLHQDWLNGKEYKCKVSNKALPAPIEKTISKAKGQPREPQVYTLPPSREEMTKNQVSLTCDVSGFYPSDIAVEWESDGQPENNYKTTPPVLDSDGSFFLYSKLTVDKSRWEQGDVFSCSVMHEALHNHYTQKSLSLSPGK

SEQ ID NO: 23552 - protein, 121 aa, Artificial Sequence
  Description of Artificial Sequence: Synthetic polypeptide
  VH of XENP020519
EVKLEESGGGLVQPGGSMKLSCAASGFTFSDAWMDWVRQSPEKGLEWVAEIRTKARNHATYYAESVKGRFTISRDDSKSSVYLQMNSLRAEDTGIYYCTRLANWDWYFDVWGAGTTVTVSS

SEQ ID NO: 23553 - protein, 5 aa, Artificial Sequence
  Description of Artificial Sequence: Synthetic peptide
  XENP020519 vhCDR1
DAWMD

SEQ ID NO: 23554 - protein, 19 aa, Artificial Sequence
  Description of Artificial Sequence: Synthetic peptide
  XENP020519 vhCDR2
EIRTKARNHATYYAESVKG

SEQ ID NO: 23555 - protein, 10 aa, Artificial Sequence
  Description of Artificial Sequence: Synthetic peptide
  XENP020519 vhCDR3
LANWDWYFDV

SEQ ID NO: 23556 - protein, 218 aa, Artificial Sequence; identical to SEQ ID NO: 22266
  Description of Artificial Sequence: Synthetic polypeptide
  XENP020519 7G8_H0.67_L0_IgG1_PVA_/S267K Light Chain

SEQ ID NO: 23557 - protein, 111 aa, Artificial Sequence; identical to SEQ ID NO: 22267
  Description of Artificial Sequence: Synthetic polypeptide
  VL of XENP020519

SEQ ID NO: 23558 - protein, 15 aa, Artificial Sequence
  Description of Artificial Sequence: Synthetic peptide
  XENP020519 vlCDR1
KASQSVDYDGDSYMN

SEQ ID NO: 23559 - protein, 7 aa, Artificial Sequence
  Description of Artificial Sequence: Synthetic peptide
  XENP020519 vlCDR2
AASNLES

SEQ ID NO: 23560 - protein, 9 aa, Artificial Sequence
  Description of Artificial Sequence: Synthetic peptide
  XENP020519 vlCDR3
QQSNEDPFT

SEQ ID NO: 23561 - protein, 450 aa, Artificial Sequence
  Description of Artificial Sequence: Synthetic polypeptide
  XENP020520 7G8_H0.68_L0_IgG1_PVA_/S267K Heavy Chain
EVKLEESGGGLVQPGGSMKLSCAASGFTFSDAWMDWVRQSPEKGLEWVAEIRTKALNHATYYAESVKGRFTISRDDSKSSVYLQMNSLRAEDTGIYYCTRLANWDWYFDVWGAGTTVTVSSASTKGPSVFPLAPSSKSTSGGTAALGCLVKDYFPEPVTVSWNSGALTSGVHTFPAVLQSSGLYSLSSVVTVPSSSLGTQTYICNVNHKPSDTKVDKKVEPKSCDKTHTCPPCPAPPVAGPSVFLFPPKPKDTLMISRTPEVTCVVVDVKHEDPEVKFNWYVDGVEVHNAKTKPREEEYNSTYRVVSVLTVLHQDWLNGKEYKCKVSNKALPAPIEKTISKAKGQPREPQVYTLPPSREEMTKNQVSLTCDVSGFYPSDIAVEWESDGQPENNYKTTPPVLDSDGSFFLYSKLTVDKSRWEQGDVFSCSVMHEALHNHYTQKSLSLSPGK

SEQ ID NO: 23562 - protein, 121 aa, Artificial Sequence
  Description of Artificial Sequence: Synthetic polypeptide
  VH of XENP020520
EVKLEESGGGLVQPGGSMKLSCAASGFTFSDAWMDWVRQSPEKGLEWVAEIRTKALNHATYYAESVKGRFTISRDDSKSSVYLQMNSLRAEDTGIYYCTRLANWDWYFDVWGAGTTVTVSS

SEQ ID NO: 23563 - protein, 5 aa, Artificial Sequence
  Description of Artificial Sequence: Synthetic peptide
  XENP020520 vhCDR1
DAWMD

SEQ ID NO: 23564 - protein, 19 aa, Artificial Sequence
  Description of Artificial Sequence: Synthetic peptide
  XENP020520 vhCDR2
EIRTKALNHATYYAESVKG

SEQ ID NO: 23565 - protein, 10 aa, Artificial Sequence
  Description of Artificial Sequence: Synthetic peptide
  XENP020520 vhCDR3
LANWDWYFDV

SEQ ID NO: 23566 - protein, 218 aa, Artificial Sequence; identical to SEQ ID NO: 22266
  Description of Artificial Sequence: Synthetic polypeptide
  XENP020520 7G8_H0.68_L0_IgG1_PVA_/S267K Light Chain

SEQ ID NO: 23567 - protein, 111 aa, Artificial Sequence; identical to SEQ ID NO: 22267
  Description of Artificial Sequence: Synthetic polypeptide
  VL of XENP020520

SEQ ID NO: 23568 - protein, 15 aa, Artificial Sequence
  Description of Artificial Sequence: Synthetic peptide
  XENP020520 vlCDR1
KASQSVDYDGDSYMN

SEQ ID NO: 23569 - protein, 7 aa, Artificial Sequence
  Description of Artificial Sequence: Synthetic peptide
  XENP020520 vlCDR2
AASNLES

SEQ ID NO: 23570 - protein, 9 aa, Artificial Sequence
  Description of Artificial Sequence: Synthetic peptide
  XENP020520 vlCDR3
QQSNEDPFT

SEQ ID NO: 23571 - protein, 450 aa, Artificial Sequence
  Description of Artificial Sequence: Synthetic polypeptide
  XENP020521 7G8_H0.69_L0_IgG1_PVA_/S267K Heavy Chain
EVKLEESGGGLVQPGGSMKLSCAASGFTFSDAWMDWVRQSPEKGLEWVAEIRTKATNHATYYAESVKGRFTISRDDSKSSVYLQMNSLRAEDTGIYYCTRLANWDWYFDVWGAGTTVTVSSASTKGPSVFPLAPSSKSTSGGTAALGCLVKDYFPEPVTVSWNSGALTSGVHTFPAVLQSSGLYSLSSVVTVPSSSLGTQTYICNVNHKPSDTKVDKKVEPKSCDKTHTCPPCPAPPVAGPSVFLFPPKPKDTLMISRTPEVTCVVVDVKHEDPEVKFNWYVDGVEVHNAKTKPREEEYNSTYRVVSVLTVLHQDWLNGKEYKCKVSNKALPAPIEKTISKAKGQPREPQVYTLPPSREEMTKNQVSLTCDVSGFYPSDIAVEWESDGQPENNYKTTPPVLDSDGSFFLYSKLTVDKSRWEQGDVFSCSVMHEALHNHYTQKSLSLSPGK

SEQ ID NO: 23572 - protein, 121 aa, Artificial Sequence
  Description of Artificial Sequence: Synthetic polypeptide
  VH of XENP020521
EVKLEESGGGLVQPGGSMKLSCAASGFTFSDAWMDWVRQSPEKGLEWVAEIRTKATNHATYYAESVKGRFTISRDDSKSSVYLQMNSLRAEDTGIYYCTRLANWDWYFDVWGAGTTVTVSS

SEQ ID NO: 23573 - protein, 5 aa, Artificial Sequence
  Description of Artificial Sequence: Synthetic peptide
  XENP020521 vhCDR1
DAWMD

SEQ ID NO: 23574 - protein, 19 aa, Artificial Sequence
  Description of Artificial Sequence: Synthetic peptide
  XENP020521 vhCDR2
EIRTKATNHATYYAESVKG

SEQ ID NO: 23575 - protein, 10 aa, Artificial Sequence
  Description of Artificial Sequence: Synthetic peptide
  XENP020521 vhCDR3
LANWDWYFDV

SEQ ID NO: 23576 - protein, 218 aa, Artificial Sequence; identical to SEQ ID NO: 22266
  Description of Artificial Sequence: Synthetic polypeptide
  XENP020521 7G8_H0.69_L0_IgG1_PVA_/S267K Light Chain

SEQ ID NO: 23577 - protein, 111 aa, Artificial Sequence; identical to SEQ ID NO: 22267
  Description of Artificial Sequence: Synthetic polypeptide
  VL of XENP020521

SEQ ID NO: 23578 - protein, 15 aa, Artificial Sequence
  Description of Artificial Sequence: Synthetic peptide
  XENP020521 vlCDR1
KASQSVDYDGDSYMN

SEQ ID NO: 23579 - protein, 7 aa, Artificial Sequence
  Description of Artificial Sequence: Synthetic peptide
  XENP020521 vlCDR2
AASNLES

SEQ ID NO: 23580 - protein, 9 aa, Artificial Sequence
  Description of Artificial Sequence: Synthetic peptide
  XENP020521 vlCDR3
QQSNEDPFT

SEQ ID NO: 23581 - protein, 450 aa, Artificial Sequence
  Description of Artificial Sequence: Synthetic polypeptide
  XENP020522 7G8_H0.70_L0_IgG1_PVA_/S267K Heavy Chain
EVKLEESGGGLVQPGGSMKLSCAASGFTFSDAWMDWVRQSPEKGLEWVAEIRTKAGNHATYYAESVKGRFTISRDDSKSSVYLQMNSLRAEDTGIYYCTRLANWDWYFDVWGAGTTVTVSSASTKGPSVFPLAPSSKSTSGGTAALGCLVKDYFPEPVTVSWNSGALTSGVHTFPAVLQSSGLYSLSSVVTVPSSSLGTQTYICNVNHKPSDTKVDKKVEPKSCDKTHTCPPCPAPPVAGPSVFLFPPKPKDTLMISRTPEVTCVVVDVKHEDPEVKFNWYVDGVEVHNAKTKPREEEYNSTYRVVSVLTVLHQDWLNGKEYKCKVSNKALPAPIEKTISKAKGQPREPQVYTLPPSREEMTKNQVSLTCDVSGFYPSDIAVEWESDGQPENNYKTTPPVLDSDGSFFLYSKLTVDKSRWEQGDVFSCSVMHEALHNHYTQKSLSLSPGK

SEQ ID NO: 23582 - protein, 121 aa, Artificial Sequence
  Description of Artificial Sequence: Synthetic polypeptide
  VH of XENP020522
EVKLEESGGGLVQPGGSMKLSCAASGFTFSDAWMDWVRQSPEKGLEWVAEIRTKAGNHATYYAESVKGRFTISRDDSKSSVYLQMNSLRAEDTGIYYCTRLANWDWYFDVWGAGTTVTVSS

SEQ ID NO: 23583 - protein, 5 aa, Artificial Sequence
  Description of Artificial Sequence: Synthetic peptide
  XENP020522 vhCDR1
DAWMD

SEQ ID NO: 23584 - protein, 19 aa, Artificial Sequence
  Description of Artificial Sequence: Synthetic peptide
  XENP020522 vhCDR2
EIRTKAGNHATYYAESVKG

SEQ ID NO: 23585 - protein, 10 aa, Artificial Sequence
  Description of Artificial Sequence: Synthetic peptide
  XENP020522 vhCDR3
LANWDWYFDV

SEQ ID NO: 23586 - protein, 218 aa, Artificial Sequence; identical to SEQ ID NO: 22266
  Description of Artificial Sequence: Synthetic polypeptide
  XENP020522 7G8_H0.70_L0_IgG1_PVA_/S267K Light Chain

SEQ ID NO: 23587 - protein, 111 aa, Artificial Sequence; identical to SEQ ID NO: 22267
  Description of Artificial Sequence: Synthetic polypeptide
  VL of XENP020522

SEQ ID NO: 23588 - protein, 15 aa, Artificial Sequence
  Description of Artificial Sequence: Synthetic peptide
  XENP020522 vlCDR1
KASQSVDYDGDSYMN

SEQ ID NO: 23589 - protein, 7 aa, Artificial Sequence
  Description of Artificial Sequence: Synthetic peptide
  XENP020522 vlCDR2
AASNLES

SEQ ID NO: 23590 - protein, 9 aa, Artificial Sequence
  Description of Artificial Sequence: Synthetic peptide
  XENP020522 vlCDR3
QQSNEDPFT

SEQ ID NO: 23591 - protein, 450 aa, Artificial Sequence
  Description of Artificial Sequence: Synthetic polypeptide
  XENP020523 7G8_H0.71_L0_IgG1_PVA_/S267K Heavy Chain
EVKLEESGGGLVQPGGSMKLSCAASGFTFSDAWMDWVRQSPEKGLEWVAEIRTKAYNHATYYAESVKGRFTISRDDSKSSVYLQMNSLRAEDTGIYYCTRLANWDWYFDVWGAGTTVTVSSASTKGPSVFPLAPSSKSTSGGTAALGCLVKDYFPEPVTVSWNSGALTSGVHTFPAVLQSSGLYSLSSVVTVPSSSLGTQTYICNVNHKPSDTKVDKKVEPKSCDKTHTCPPCPAPPVAGPSVFLFPPKPKDTLMISRTPEVTCVVVDVKHEDPEVKFNWYVDGVEVHNAKTKPREEEYNSTYRVVSVLTVLHQDWLNGKEYKCKVSNKALPAPIEKTISKAKGQPREPQVYTLPPSREEMTKNQVSLTCDVSGFYPSDIAVEWESDGQPENNYKTTPPVLDSDGSFFLYSKLTVDKSRWEQGDVFSCSVMHEALHNHYTQKSLSLSPGK

SEQ ID NO: 23592 - protein, 121 aa, Artificial Sequence
  Description of Artificial Sequence: Synthetic polypeptide
  VH of XENP020523
EVKLEESGGGLVQPGGSMKLSCAASGFTFSDAWMDWVRQSPEKGLEWVAEIRTKAYNHATYYAESVKGRFTISRDDSKSSVYLQMNSLRAEDTGIYYCTRLANWDWYFDVWGAGTTVTVSS

SEQ ID NO: 23593 - protein, 5 aa, Artificial Sequence
  Description of Artificial Sequence: Synthetic peptide
  XENP020523 vhCDR1
DAWMD

SEQ ID NO: 23594 - protein, 19 aa, Artificial Sequence
  Description of Artificial Sequence: Synthetic peptide
  XENP020523 vhCDR2
EIRTKAYNHATYYAESVKG

SEQ ID NO: 23595 - protein, 10 aa, Artificial Sequence
  Description of Artificial Sequence: Synthetic peptide
  XENP020523 vhCDR3
LANWDWYFDV

SEQ ID NO: 23596 - protein, 218 aa, Artificial Sequence; identical to SEQ ID NO: 22266
  Description of Artificial Sequence: Synthetic polypeptide
  XENP020523 7G8_H0.71_L0_IgG1_PVA_/S267K Light Chain

SEQ ID NO: 23597 - protein, 111 aa, Artificial Sequence; identical to SEQ ID NO: 22267
  Description of Artificial Sequence: Synthetic polypeptide
  VL of XENP020523

SEQ ID NO: 23598 - protein, 15 aa, Artificial Sequence
  Description of Artificial Sequence: Synthetic peptide
  XENP020523 vlCDR1
KASQSVDYDGDSYMN

SEQ ID NO: 23599 - protein, 7 aa, Artificial Sequence
  Description of Artificial Sequence: Synthetic peptide
  XENP020523 vlCDR2
AASNLES

SEQ ID NO: 23600 - protein, 9 aa, Artificial Sequence
  Description of Artificial Sequence: Synthetic peptide
  XENP020523 vlCDR3
QQSNEDPFT

SEQ ID NO: 23601 - protein, 450 aa, Artificial Sequence
  Description of Artificial Sequence: Synthetic polypeptide
  XENP020524 7G8_H0.72_L0_IgG1_PVA_/S267K Heavy Chain
EVKLEESGGGLVQPGGSMKLSCAASGFTFSDAWMDWVRQSPEKGLEWVAEIRTKANDHATYYAESVKGRFTISRDDSKSSVYLQMNSLRAEDTGIYYCTRLANWDWYFDVWGAGTTVTVSSASTKGPSVFPLAPSSKSTSGGTAALGCLVKDYFPEPVTVSWNSGALTSGVHTFPAVLQSSGLYSLSSVVTVPSSSLGTQTYICNVNHKPSDTKVDKKVEPKSCDKTHTCPPCPAPPVAGPSVFLFPPKPKDTLMISRTPEVTCVVVDVKHEDPEVKFNWYVDGVEVHNAKTKPREEEYNSTYRVVSVLTVLHQDWLNGKEYKCKVSNKALPAPIEKTISKAKGQPREPQVYTLPPSREEMTKNQVSLTCDVSGFYPSDIAVEWESDGQPENNYKTTPPVLDSDGSFFLYSKLTVDKSRWEQGDVFSCSVMHEALHNHYTQKSLSLSPGK

SEQ ID NO: 23602 - protein, 121 aa, Artificial Sequence
  Description of Artificial Sequence: Synthetic polypeptide
  VH of XENP020524
EVKLEESGGGLVQPGGSMKLSCAASGFTFSDAWMDWVRQSPEKGLEWVAEIRTKANDHATYYAESVKGRFTISRDDSKSSVYLQMNSLRAEDTGIYYCTRLANWDWYFDVWGAGTTVTVSS

SEQ ID NO: 23603 - protein, 5 aa, Artificial Sequence
  Description of Artificial Sequence: Synthetic peptide
  XENP020524 vhCDR1
DAWMD

SEQ ID NO: 23604 - protein, 19 aa, Artificial Sequence
  Description of Artificial Sequence: Synthetic peptide
  XENP020524 vhCDR2
EIRTKANDHATYYAESVKG

SEQ ID NO: 23605 - protein, 10 aa, Artificial Sequence
  Description of Artificial Sequence: Synthetic peptide
  XENP020524 vhCDR3
LANWDWYFDV

SEQ ID NO: 23606 - protein, 218 aa, Artificial Sequence; identical to SEQ ID NO: 22266
  Description of Artificial Sequence: Synthetic polypeptide
  XENP020524 7G8_H0.72_L0_IgG1_PVA_/S267K Light Chain

SEQ ID NO: 23607 - protein, 111 aa, Artificial Sequence; identical to SEQ ID NO: 22267
  Description of Artificial Sequence: Synthetic polypeptide
  VL of XENP020524

SEQ ID NO: 23608 - protein, 15 aa, Artificial Sequence
  Description of Artificial Sequence: Synthetic peptide
  XENP020524 vlCDR1
KASQSVDYDGDSYMN

SEQ ID NO: 23609 - protein, 7 aa, Artificial Sequence
  Description of Artificial Sequence: Synthetic peptide
  XENP020524 vlCDR2
AASNLES

SEQ ID NO: 23610 - protein, 9 aa, Artificial Sequence
  Description of Artificial Sequence: Synthetic peptide
  XENP020524 vlCDR3
QQSNEDPFT

SEQ ID NO: 23611 - protein, 450 aa, Artificial Sequence
  Description of Artificial Sequence: Synthetic polypeptide
  XENP020525 7G8_H0.73_L0_IgG1_PVA_/S267K Heavy Chain
EVKLEESGGGLVQPGGSMKLSCAASGFTFSDAWMDWVRQSPEKGLEWVAEIRTKANHHATYYAESVKGRFTISRDDSKSSVYLQMNSLRAEDTGIYYCTRLANWDWYFDVWGAGTTVTVSSASTKGPSVFPLAPSSKSTSGGTAALGCLVKDYFPEPVTVSWNSGALTSGVHTFPAVLQSSGLYSLSSVVTVPSSSLGTQTYICNVNHKPSDTKVDKKVEPKSCDKTHTCPPCPAPPVAGPSVFLFPPKPKDTLMISRTPEVTCVVVDVKHEDPEVKFNWYVDGVEVHNAKTKPREEEYNSTYRVVSVLTVLHQDWLNGKEYKCKVSNKALPAPIEKTISKAKGQPREPQVYTLPPSREEMTKNQVSLTCDVSGFYPSDIAVEWESDGQPENNYKTTPPVLDSDGSFFLYSKLTVDKSRWEQGDVFSCSVMHEALHNHYTQKSLSLSPGK

SEQ ID NO: 23612 - protein, 121 aa, Artificial Sequence
  Description of Artificial Sequence: Synthetic polypeptide
  VH of XENP020525
EVKLEESGGGLVQPGGSMKLSCAASGFTFSDAWMDWVRQSPEKGLEWVAEIRTKANHHATYYAESVKGRFTISRDDSKSSVYLQMNSLRAEDTGIYYCTRLANWDWYFDVWGAGTTVTVSS

SEQ ID NO: 23613 - protein, 5 aa, Artificial Sequence
  Description of Artificial Sequence: Synthetic peptide
  XENP020525 vhCDR1
DAWMD

SEQ ID NO: 23614 - protein, 19 aa, Artificial Sequence
  Description of Artificial Sequence: Synthetic peptide
  XENP020525 vhCDR2
EIRTKANHHATYYAESVKG

SEQ ID NO: 23615 - protein, 10 aa, Artificial Sequence
  Description of Artificial Sequence: Synthetic peptide
  XENP020525 vhCDR3
LANWDWYFDV

SEQ ID NO: 23616 - protein, 218 aa, Artificial Sequence; identical to SEQ ID NO: 22266
  Description of Artificial Sequence: Synthetic polypeptide
  XENP020525 7G8_H0.73_L0_IgG1_PVA_/S267K Light Chain

SEQ ID NO: 23617 - protein, 111 aa, Artificial Sequence; identical to SEQ ID NO: 22267
  Description of Artificial Sequence: Synthetic polypeptide
  VL of XENP020525

SEQ ID NO: 23618 - protein, 15 aa, Artificial Sequence
  Description of Artificial Sequence: Synthetic peptide
  XENP020525 vlCDR1
KASQSVDYDGDSYMN

SEQ ID NO: 23619 - protein, 7 aa, Artificial Sequence
  Description of Artificial Sequence: Synthetic peptide
  XENP020525 vlCDR2
AASNLES

SEQ ID NO: 23620 - protein, 9 aa, Artificial Sequence
  Description of Artificial Sequence: Synthetic peptide
  XENP020525 vlCDR3
QQSNEDPFT

SEQ ID NO: 23621 - protein, 450 aa, Artificial Sequence
  Description of Artificial Sequence: Synthetic polypeptide
  XENP020526 7G8_H0.74_L0_IgG1_PVA_/S267K Heavy Chain
EVKLEESGGGLVQPGGSMKLSCAASGFTFSDAWMDWVRQSPEKGLEWVAEIRTKANEHATYYAESVKGRFTISRDDSKSSVYLQMNSLRAEDTGIYYCTRLANWDWYFDVWGAGTTVTVSSASTKGPSVFPLAPSSKSTSGGTAALGCLVKDYFPEPVTVSWNSGALTSGVHTFPAVLQSSGLYSLSSVVTVPSSSLGTQTYICNVNHKPSDTKVDKKVEPKSCDKTHTCPPCPAPPVAGPSVFLFPPKPKDTLMISRTPEVTCVVVDVKHEDPEVKFNWYVDGVEVHNAKTKPREEEYNSTYRVVSVLTVLHQDWLNGKEYKCKVSNKALPAPIEKTISKAKGQPREPQVYTLPPSREEMTKNQVSLTCDVSGFYPSDIAVEWESDGQPENNYKTTPPVLDSDGSFFLYSKLTVDKSRWEQGDVFSCSVMHEALHNHYTQKSLSLSPGK

SEQ ID NO: 23622 - protein, 121 aa, Artificial Sequence
  Description of Artificial Sequence: Synthetic polypeptide
  VH of XENP020526
EVKLEESGGGLVQPGGSMKLSCAASGFTFSDAWMDWVRQSPEKGLEWVAEIRTKANEHATYYAESVKGRFTISRDDSKSSVYLQMNSLRAEDTGIYYCTRLANWDWYFDVWGAGTTVTVSS

SEQ ID NO: 23623 - protein, 5 aa, Artificial Sequence
  Description of Artificial Sequence: Synthetic peptide
  XENP020526 vhCDR1
DAWMD

SEQ ID NO: 23624 - protein, 19 aa, Artificial Sequence
  Description of Artificial Sequence: Synthetic peptide
  XENP020526 vhCDR2
EIRTKANEHATYYAESVKG

SEQ ID NO: 23625 - protein, 10 aa, Artificial Sequence
  Description of Artificial Sequence: Synthetic peptide
  XENP020526 vhCDR3
LANWDWYFDV

SEQ ID NO: 23626 - protein, 218 aa, Artificial Sequence; identical to SEQ ID NO: 22266
  Description of Artificial Sequence: Synthetic polypeptide
  XENP020526 7G8_H0.74_L0_IgG1_PVA_/S267K Light Chain

SEQ ID NO: 23627 - protein, 111 aa, Artificial Sequence; identical to SEQ ID NO: 22267
  Description of Artificial Sequence: Synthetic polypeptide
  VL of XENP020526

SEQ ID NO: 23628 - protein, 15 aa, Artificial Sequence
  Description of Artificial Sequence: Synthetic peptide
  XENP020526 vlCDR1
KASQSVDYDGDSYMN

SEQ ID NO: 23629 - protein, 7 aa, Artificial Sequence
  Description of Artificial Sequence: Synthetic peptide
  XENP020526 vlCDR2
AASNLES

SEQ ID NO: 23630 - protein, 9 aa, Artificial Sequence
  Description of Artificial Sequence: Synthetic peptide
  XENP020526 vlCDR3
QQSNEDPFT

SEQ ID NO: 23631 - protein, 450 aa, Artificial Sequence
  Description of Artificial Sequence: Synthetic polypeptide
  XENP020527 7G8_H0.75_L0_IgG1_PVA_/S267K Heavy Chain
EVKLEESGGGLVQPGGSMKLSCAASGFTFSDAWMDWVRQSPEKGLEWVAEIRTKANSHATYYAESVKGRFTISRDDSKSSVYLQMNSLRAEDTGIYYCTRLANWDWYFDVWGAGTTVTVSSASTKGPSVFPLAPSSKSTSGGTAALGCLVKDYFPEPVTVSWNSGALTSGVHTFPAVLQSSGLYSLSSVVTVPSSSLGTQTYICNVNHKPSDTKVDKKVEPKSCDKTHTCPPCPAPPVAGPSVFLFPPKPKDTLMISRTPEVTCVVVDVKHEDPEVKFNWYVDGVEVHNAKTKPREEEYNSTYRVVSVLTVLHQDWLNGKEYKCKVSNKALPAPIEKTISKAKGQPREPQVYTLPPSREEMTKNQVSLTCDVSGFYPSDIAVEWESDGQPENNYKTTPPVLDSDGSFFLYSKLTVDKSRWEQGDVFSCSVMHEALHNHYTQKSLSLSPGK

SEQ ID NO: 23632 - protein, 121 aa, Artificial Sequence
  Description of Artificial Sequence: Synthetic polypeptide
  VH of XENP020527
EVKLEESGGGLVQPGGSMKLSCAASGFTFSDAWMDWVRQSPEKGLEWVAEIRTKANSHATYYAESVKGRFTISRDDSKSSVYLQMNSLRAEDTGIYYCTRLANWDWYFDVWGAGTTVTVSS

SEQ ID NO: 23633 - protein, 5 aa, Artificial Sequence
  Description of Artificial Sequence: Synthetic peptide
  XENP020527 vhCDR1
DAWMD

SEQ ID NO: 23634 - protein, 19 aa, Artificial Sequence
  Description of Artificial Sequence: Synthetic peptide
  XENP020527 vhCDR2
EIRTKANSHATYYAESVKG

SEQ ID NO: 23635 - protein, 10 aa, Artificial Sequence
  Description of Artificial Sequence: Synthetic peptide
  XENP020527 vhCDR3
LANWDWYFDV

SEQ ID NO: 23636 - protein, 218 aa, Artificial Sequence; identical to SEQ ID NO: 22266
  Description of Artificial Sequence: Synthetic polypeptide
  XENP020527 7G8_H0.75_L0_IgG1_PVA_/S267K Light Chain

SEQ ID NO: 23637 - protein, 111 aa, Artificial Sequence; identical to SEQ ID NO: 22267
  Description of Artificial Sequence: Synthetic polypeptide
  VL of XENP020527

SEQ ID NO: 23638 - protein, 15 aa, Artificial Sequence
  Description of Artificial Sequence: Synthetic peptide
  XENP020527 vlCDR1
KASQSVDYDGDSYMN

SEQ ID NO: 23639 - protein, 7 aa, Artificial Sequence
  Description of Artificial Sequence: Synthetic peptide
  XENP020527 vlCDR2
AASNLES

SEQ ID NO: 23640 - protein, 9 aa, Artificial Sequence
  Description of Artificial Sequence: Synthetic peptide
  XENP020527 vlCDR3
QQSNEDPFT

SEQ ID NO: 23641 - protein, 450 aa, Artificial Sequence
  Description of Artificial Sequence: Synthetic polypeptide
  XENP020528 7G8_H0.76_L0_IgG1_PVA_/S267K Heavy Chain
EVKLEESGGGLVQPGGSMKLSCAASGFTFSDAWMDWVRQSPEKGLEWVAEIRTKANRHATYYAESVKGRFTISRDDSKSSVYLQMNSLRAEDTGIYYCTRLANWDWYFDVWGAGTTVTVSSASTKGPSVFPLAPSSKSTSGGTAALGCLVKDYFPEPVTVSWNSGALTSGVHTFPAVLQSSGLYSLSSVVTVPSSSLGTQTYICNVNHKPSDTKVDKKVEPKSCDKTHTCPPCPAPPVAGPSVFLFPPKPKDTLMISRTPEVTCVVVDVKHEDPEVKFNWYVDGVEVHNAKTKPREEEYNSTYRVVSVLTVLHQDWLNGKEYKCKVSNKALPAPIEKTISKAKGQPREPQVYTLPPSREEMTKNQVSLTCDVSGFYPSDIAVEWESDGQPENNYKTTPPVLDSDGSFFLYSKLTVDKSRWEQGDVFSCSVMHEALHNHYTQKSLSLSPGK

SEQ ID NO: 23642 - protein, 121 aa, Artificial Sequence
  Description of Artificial Sequence: Synthetic polypeptide
  VH of XENP020528
EVKLEESGGGLVQPGGSMKLSCAASGFTFSDAWMDWVRQSPEKGLEWVAEIRTKANRHATYYAESVKGRFTISRDDSKSSVYLQMNSLRAEDTGIYYCTRLANWDWYFDVWGAGTTVTVSS

SEQ ID NO: 23643 - protein, 5 aa, Artificial Sequence
  Description of Artificial Sequence: Synthetic peptide
  XENP020528 vhCDR1
DAWMD

SEQ ID NO: 23644 - protein, 19 aa, Artificial Sequence
  Description of Artificial Sequence: Synthetic peptide
  XENP020528 vhCDR2
EIRTKANRHATYYAESVKG

SEQ ID NO: 23645 - protein, 10 aa, Artificial Sequence
  Description of Artificial Sequence: Synthetic peptide
  XENP020528 vhCDR3
LANWDWYFDV

SEQ ID NO: 23646 - protein, 218 aa, Artificial Sequence; identical to SEQ ID NO: 22266
  Description of Artificial Sequence: Synthetic polypeptide
  XENP020528 7G8_H0.76_L0_IgG1_PVA_/S267K Light Chain

SEQ ID NO: 23647 - protein, 111 aa, Artificial Sequence; identical to SEQ ID NO: 22267
  Description of Artificial Sequence: Synthetic polypeptide
  VL of XENP020528

SEQ ID NO: 23648 - protein, 15 aa, Artificial Sequence
  Description of Artificial Sequence: Synthetic peptide
  XENP020528 vlCDR1
KASQSVDYDGDSYMN

SEQ ID NO: 23649 - protein, 7 aa, Artificial Sequence
  Description of Artificial Sequence: Synthetic peptide
  XENP020528 vlCDR2
AASNLES

SEQ ID NO: 23650 - protein, 9 aa, Artificial Sequence
  Description of Artificial Sequence: Synthetic peptide
  XENP020528 vlCDR3
QQSNEDPFT

SEQ ID NO: 23651 - protein, 450 aa, Artificial Sequence
  Description of Artificial Sequence: Synthetic polypeptide
  XENP020529 7G8_H0.77_L0_IgG1_PVA_/S267K Heavy Chain
EVKLEESGGGLVQPGGSMKLSCAASGFTFSDAWMDWVRQSPEKGLEWVAEIRTKANLHATYYAESVKGRFTISRDDSKSSVYLQMNSLRAEDTGIYYCTRLANWDWYFDVWGAGTTVTVSSASTKGPSVFPLAPSSKSTSGGTAALGCLVKDYFPEPVTVSWNSGALTSGVHTFPAVLQSSGLYSLSSVVTVPSSSLGTQTYICNVNHKPSDTKVDKKVEPKSCDKTHTCPPCPAPPVAGPSVFLFPPKPKDTLMISRTPEVTCVVVDVKHEDPEVKFNWYVDGVEVHNAKTKPREEEYNSTYRVVSVLTVLHQDWLNGKEYKCKVSNKALPAPIEKTISKAKGQPREPQVYTLPPSREEMTKNQVSLTCDVSGFYPSDIAVEWESDGQPENNYKTTPPVLDSDGSFFLYSKLTVDKSRWEQGDVFSCSVMHEALHNHYTQKSLSLSPGK

SEQ ID NO: 23652 - protein, 121 aa, Artificial Sequence
  Description of Artificial Sequence: Synthetic polypeptide
  VH of XENP020529
EVKLEESGGGLVQPGGSMKLSCAASGFTFSDAWMDWVRQSPEKGLEWVAEIRTKANLHATYYAESVKGRFTISRDDSKSSVYLQMNSLRAEDTGIYYCTRLANWDWYFDVWGAGTTVTVSS

SEQ ID NO: 23653 - protein, 5 aa, Artificial Sequence
  Description of Artificial Sequence: Synthetic peptide
  XENP020529 vhCDR1
DAWMD

SEQ ID NO: 23654 - protein, 19 aa, Artificial Sequence
  Description of Artificial Sequence: Synthetic peptide
  XENP020529 vhCDR2
EIRTKANLHATYYAESVKG

SEQ ID NO: 23655 - protein, 10 aa, Artificial Sequence
  Description of Artificial Sequence: Synthetic peptide
  XENP020529 vhCDR3
LANWDWYFDV

SEQ ID NO: 23656 - protein, 218 aa, Artificial Sequence; identical to SEQ ID NO: 22266
  Description of Artificial Sequence: Synthetic polypeptide
  XENP020529 7G8_H0.77_L0_IgG1_PVA_/S267K Light Chain

SEQ ID NO: 23657 - protein, 111 aa, Artificial Sequence; identical to SEQ ID NO: 22267
  Description of Artificial Sequence: Synthetic polypeptide
  VL of XENP020529

SEQ ID NO: 23658 - protein, 15 aa, Artificial Sequence
  Description of Artificial Sequence: Synthetic peptide
  XENP020529 vlCDR1
KASQSVDYDGDSYMN

SEQ ID NO: 23659 - protein, 7 aa, Artificial Sequence
  Description of Artificial Sequence: Synthetic peptide
  XENP020529 vlCDR2
AASNLES

SEQ ID NO: 23660 - protein, 9 aa, Artificial Sequence
  Description of Artificial Sequence: Synthetic peptide
  XENP020529 vlCDR3
QQSNEDPFT

SEQ ID NO: 23661 - protein, 450 aa, Artificial Sequence
  Description of Artificial Sequence: Synthetic polypeptide
  XENP020530 7G8_H0.78_L0_IgG1_PVA_/S267K Heavy Chain
EVKLEESGGGLVQPGGSMKLSCAASGFTFSDAWMDWVRQSPEKGLEWVAEIRTKANTHATYYAESVKGRFTISRDDSKSSVYLQMNSLRAEDTGIYYCTRLANWDWYFDVWGAGTTVTVSSASTKGPSVFPLAPSSKSTSGGTAALGCLVKDYFPEPVTVSWNSGALTSGVHTFPAVLQSSGLYSLSSVVTVPSSSLGTQTYICNVNHKPSDTKVDKKVEPKSCDKTHTCPPCPAPPVAGPSVFLFPPKPKDTLMISRTPEVTCVVVDVKHEDPEVKFNWYVDGVEVHNAKTKPREEEYNSTYRVVSVLTVLHQDWLNGKEYKCKVSNKALPAPIEKTISKAKGQPREPQVYTLPPSREEMTKNQVSLTCDVSGFYPSDIAVEWESDGQPENNYKTTPPVLDSDGSFFLYSKLTVDKSRWEQGDVFSCSVMHEALHNHYTQKSLSLSPGK

SEQ ID NO: 23662 - protein, 121 aa, Artificial Sequence
  Description of Artificial Sequence: Synthetic polypeptide
  VH of XENP020530
EVKLEESGGGLVQPGGSMKLSCAASGFTFSDAWMDWVRQSPEKGLEWVAEIRTKANTHATYYAESVKGRFTISRDDSKSSVYLQMNSLRAEDTGIYYCTRLANWDWYFDVWGAGTTVTVSS

SEQ ID NO: 23663 - protein, 5 aa, Artificial Sequence
  Description of Artificial Sequence: Synthetic peptide
  XENP020530 vhCDR1
DAWMD

SEQ ID NO: 23664 - protein, 19 aa, Artificial Sequence
  Description of Artificial Sequence: Synthetic peptide
  XENP020530 vhCDR2
EIRTKANTHATYYAESVKG

SEQ ID NO: 23665 - protein, 10 aa, Artificial Sequence
  Description of Artificial Sequence: Synthetic peptide
  XENP020530 vhCDR3
LANWDWYFDV

SEQ ID NO: 23666 - protein, 218 aa, Artificial Sequence; identical to SEQ ID NO: 22266
  Description of Artificial Sequence: Synthetic polypeptide
  XENP020530 7G8_H0.78_L0_IgG1_PVA_/S267K Light Chain

SEQ ID NO: 23667 - protein, 111 aa, Artificial Sequence; identical to SEQ ID NO: 22267
  Description of Artificial Sequence: Synthetic polypeptide
  VL of XENP020530

SEQ ID NO: 23668 - protein, 15 aa, Artificial Sequence
  Description of Artificial Sequence: Synthetic peptide
  XENP020530 vlCDR1
KASQSVDYDGDSYMN

SEQ ID NO: 23669 - protein, 7 aa, Artificial Sequence
  Description of Artificial Sequence: Synthetic peptide
  XENP020530 vlCDR2
AASNLES

SEQ ID NO: 23670 - protein, 9 aa, Artificial Sequence
  Description of Artificial Sequence: Synthetic peptide
  XENP020530 vlCDR3
QQSNEDPFT

SEQ ID NO: 23671 - protein, 450 aa, Artificial Sequence
  Description of Artificial Sequence: Synthetic polypeptide
  XENP020531 7G8_H0.79_L0_IgG1_PVA_/S267K Heavy Chain
EVKLEESGGGLVQPGGSMKLSCAASGFTFSDAWMDWVRQSPEKGLEWVAEIRTKANGHATYYAESVKGRFTISRDDSKSSVYLQMNSLRAEDTGIYYCTRLANWDWYFDVWGAGTTVTVSSASTKGPSVFPLAPSSKSTSGGTAALGCLVKDYFPEPVTVSWNSGALTSGVHTFPAVLQSSGLYSLSSVVTVPSSSLGTQTYICNVNHKPSDTKVDKKVEPKSCDKTHTCPPCPAPPVAGPSVFLFPPKPKDTLMISRTPEVTCVVVDVKHEDPEVKFNWYVDGVEVHNAKTKPREEEYNSTYRVVSVLTVLHQDWLNGKEYKCKVSNKALPAPIEKTISKAKGQPREPQVYTLPPSREEMTKNQVSLTCDVSGFYPSDIAVEWESDGQPENNYKTTPPVLDSDGSFFLYSKLTVDKSRWEQGDVFSCSVMHEALHNHYTQKSLSLSPGK

SEQ ID NO: 23672 - protein, 121 aa, Artificial Sequence
  Description of Artificial Sequence: Synthetic polypeptide
  VH of XENP020531
EVKLEESGGGLVQPGGSMKLSCAASGFTFSDAWMDWVRQSPEKGLEWVAEIRTKANGHATYYAESVKGRFTISRDDSKSSVYLQMNSLRAEDTGIYYCTRLANWDWYFDVWGAGTTVTVSS

SEQ ID NO: 23673 - protein, 5 aa, Artificial Sequence
  Description of Artificial Sequence: Synthetic peptide
  XENP020531 vhCDR1
DAWMD

SEQ ID NO: 23674 - protein, 19 aa, Artificial Sequence
  Description of Artificial Sequence: Synthetic peptide
  XENP020531 vhCDR2
EIRTKANGHATYYAESVKG

SEQ ID NO: 23675 - protein, 10 aa, Artificial Sequence
  Description of Artificial Sequence: Synthetic peptide
  XENP020531 vhCDR3
LANWDWYFDV

SEQ ID NO: 23676 - protein, 218 aa, Artificial Sequence; identical to SEQ ID NO: 22266
  Description of Artificial Sequence: Synthetic polypeptide
  XENP020531 7G8_H0.79_L0_IgG1_PVA_/S267K Light Chain

SEQ ID NO: 23677 - protein, 111 aa, Artificial Sequence; identical to SEQ ID NO: 22267
  Description of Artificial Sequence: Synthetic polypeptide
  VL of XENP020531

SEQ ID NO: 23678 - protein, 15 aa, Artificial Sequence
  Description of Artificial Sequence: Synthetic peptide
  XENP020531 vlCDR1
KASQSVDYDGDSYMN

SEQ ID NO: 23679 - protein, 7 aa, Artificial Sequence
  Description of Artificial Sequence: Synthetic peptide
  XENP020531 vlCDR2
AASNLES

SEQ ID NO: 23680 - protein, 9 aa, Artificial Sequence
  Description of Artificial Sequence: Synthetic peptide
  XENP020531 vlCDR3
QQSNEDPFT

SEQ ID NO: 23681 - protein, 450 aa, Artificial Sequence
  Description of Artificial Sequence: Synthetic polypeptide
  XENP020532 7G8_H0.80_L0_IgG1_PVA_/S267K Heavy Chain
EVKLEESGGGLVQPGGSMKLSCAASGFTFSDAWMDWVRQSPEKGLEWVAEIRTKANYHATYYAESVKGRFTISRDDSKSSVYLQMNSLRAEDTGIYYCTRLANWDWYFDVWGAGTTVTVSSASTKGPSVFPLAPSSKSTSGGTAALGCLVKDYFPEPVTVSWNSGALTSGVHTFPAVLQSSGLYSLSSVVTVPSSSLGTQTYICNVNHKPSDTKVDKKVEPKSCDKTHTCPPCPAPPVAGPSVFLFPPKPKDTLMISRTPEVTCVVVDVKHEDPEVKFNWYVDGVEVHNAKTKPREEEYNSTYRVVSVLTVLHQDWLNGKEYKCKVSNKALPAPIEKTISKAKGQPREPQVYTLPPSREEMTKNQVSLTCDVSGFYPSDIAVEWESDGQPENNYKTTPPVLDSDGSFFLYSKLTVDKSRWEQGDVFSCSVMHEALHNHYTQKSLSLSPGK

SEQ ID NO: 23682 - protein, 121 aa, Artificial Sequence
  Description of Artificial Sequence: Synthetic polypeptide
  VH of XENP020532
EVKLEESGGGLVQPGGSMKLSCAASGFTFSDAWMDWVRQSPEKGLEWVAEIRTKANYHATYYAESVKGRFTISRDDSKSSVYLQMNSLRAEDTGIYYCTRLANWDWYFDVWGAGTTVTVSS

SEQ ID NO: 23683 - protein, 5 aa, Artificial Sequence
  Description of Artificial Sequence: Synthetic peptide
  XENP020532 vhCDR1
DAWMD

SEQ ID NO: 23684 - protein, 19 aa, Artificial Sequence
  Description of Artificial Sequence: Synthetic peptide
  XENP020532 vhCDR2
EIRTKANYHATYYAESVKG

SEQ ID NO: 23685 - protein, 10 aa, Artificial Sequence
  Description of Artificial Sequence: Synthetic peptide
  XENP020532 vhCDR3
LANWDWYFDV

SEQ ID NO: 23686 - protein, 218 aa, Artificial Sequence; identical to SEQ ID NO: 22266
  Description of Artificial Sequence: Synthetic polypeptide
  XENP020532 7G8_H0.80_L0_IgG1_PVA_/S267K Light Chain

SEQ ID NO: 23687 - protein, 111 aa, Artificial Sequence; identical to SEQ ID NO: 22267
  Description of Artificial Sequence: Synthetic polypeptide
  VL of XENP020532

SEQ ID NO: 23688 - protein, 15 aa, Artificial Sequence
  Description of Artificial Sequence: Synthetic peptide
  XENP020532 vlCDR1
KASQSVDYDGDSYMN

SEQ ID NO: 23689 - protein, 7 aa, Artificial Sequence
  Description of Artificial Sequence: Synthetic peptide
  XENP020532 vlCDR2
AASNLES

SEQ ID NO: 23690 - protein, 9 aa, Artificial Sequence
  Description of Artificial Sequence: Synthetic peptide
  XENP020532 vlCDR3
QQSNEDPFT

SEQ ID NO: 23691 - protein, 450 aa, Artificial Sequence
  Description of Artificial Sequence: Synthetic polypeptide
  XENP020533 7G8_H0.81_L0_IgG1_PVA_/S267K Heavy Chain
EVKLEESGGGLVQPGGSMKLSCAASGFTFSDAWMDWVRQSPEKGLEWVAEIRTKANNYATYYAESVKGRFTISRDDSKSSVYLQMNSLRAEDTGIYYCTRLANWDWYFDVWGAGTTVTVSSASTKGPSVFPLAPSSKSTSGGTAALGCLVKDYFPEPVTVSWNSGALTSGVHTFPAVLQSSGLYSLSSVVTVPSSSLGTQTYICNVNHKPSDTKVDKKVEPKSCDKTHTCPPCPAPPVAGPSVFLFPPKPKDTLMISRTPEVTCVVVDVKHEDPEVKFNWYVDGVEVHNAKTKPREEEYNSTYRVVSVLTVLHQDWLNGKEYKCKVSNKALPAPIEKTISKAKGQPREPQVYTLPPSREEMTKNQVSLTCDVSGFYPSDIAVEWESDGQPENNYKTTPPVLDSDGSFFLYSKLTVDKSRWEQGDVFSCSVMHEALHNHYTQKSLSLSPGK

SEQ ID NO: 23692 - protein, 121 aa, Artificial Sequence
  Description of Artificial Sequence: Synthetic polypeptide
  VH of XENP020533
EVKLEESGGGLVQPGGSMKLSCAASGFTFSDAWMDWVRQSPEKGLEWVAEIRTKANNYATYYAESVKGRFTISRDDSKSSVYLQMNSLRAEDTGIYYCTRLANWDWYFDVWGAGTTVTVSS

SEQ ID NO: 23693 - protein, 5 aa, Artificial Sequence
  Description of Artificial Sequence: Synthetic peptide
  XENP020533 vhCDR1
DAWMD

SEQ ID NO: 23694 - protein, 19 aa, Artificial Sequence
  Description of Artificial Sequence: Synthetic peptide
  XENP020533 vhCDR2
EIRTKANNYATYYAESVKG

SEQ ID NO: 23695 - protein, 10 aa, Artificial Sequence
  Description of Artificial Sequence: Synthetic peptide
  XENP020533 vhCDR3
LANWDWYFDV

SEQ ID NO: 23696 - protein, 218 aa, Artificial Sequence; identical to SEQ ID NO: 22266
  Description of Artificial Sequence: Synthetic polypeptide
  XENP020533 7G8_H0.81_L0_IgG1_PVA_/S267K Light Chain

SEQ ID NO: 23697 - protein, 111 aa, Artificial Sequence; identical to SEQ ID NO: 22267
  Description of Artificial Sequence: Synthetic polypeptide
  VL of XENP020533

SEQ ID NO: 23698 - protein, 15 aa, Artificial Sequence
  Description of Artificial Sequence: Synthetic peptide
  XENP020533 vlCDR1
KASQSVDYDGDSYMN

SEQ ID NO: 23699 - protein, 7 aa, Artificial Sequence
  Description of Artificial Sequence: Synthetic peptide
  XENP020533 vlCDR2
AASNLES

SEQ ID NO: 23700 - protein, 9 aa, Artificial Sequence
  Description of Artificial Sequence: Synthetic peptide
  XENP020533 vlCDR3
QQSNEDPFT

SEQ ID NO: 23701 - protein, 450 aa, Artificial Sequence
  Description of Artificial Sequence: Synthetic polypeptide
  XENP020534 7G8_H0.82_L0_IgG1_PVA_/S267K Heavy Chain
EVKLEESGGGLVQPGGSMKLSCAASGFTFSDAWMDWVRQSPEKGLEWVAEIRTKANNQATYYAESVKGRFTISRDDSKSSVYLQMNSLRAEDTGIYYCTRLANWDWYFDVWGAGTTVTVSSASTKGPSVFPLAPSSKSTSGGTAALGCLVKDYFPEPVTVSWNSGALTSGVHTFPAVLQSSGLYSLSSVVTVPSSSLGTQTYICNVNHKPSDTKVDKKVEPKSCDKTHTCPPCPAPPVAGPSVFLFPPKPKDTLMISRTPEVTCVVVDVKHEDPEVKFNWYVDGVEVHNAKTKPREEEYNSTYRVVSVLTVLHQDWLNGKEYKCKVSNKALPAPIEKTISKAKGQPREPQVYTLPPSREEMTKNQVSLTCDVSGFYPSDIAVEWESDGQPENNYKTTPPVLDSDGSFFLYSKLTVDKSRWEQGDVFSCSVMHEALHNHYTQKSLSLSPGK

SEQ ID NO: 23702 - protein, 121 aa, Artificial Sequence
  Description of Artificial Sequence: Synthetic polypeptide
  VH of XENP020534
EVKLEESGGGLVQPGGSMKLSCAASGFTFSDAWMDWVRQSPEKGLEWVAEIRTKANNQATYYAESVKGRFTISRDDSKSSVYLQMNSLRAEDTGIYYCTRLANWDWYFDVWGAGTTVTVSS

SEQ ID NO: 23703 - protein, 5 aa, Artificial Sequence
  Description of Artificial Sequence: Synthetic peptide
  XENP020534 vhCDR1
DAWMD

SEQ ID NO: 23704 - protein, 19 aa, Artificial Sequence
  Description of Artificial Sequence: Synthetic peptide
  XENP020534 vhCDR2
EIRTKANNQATYYAESVKG

SEQ ID NO: 23705 - protein, 10 aa, Artificial Sequence
  Description of Artificial Sequence: Synthetic peptide
  XENP020534 vhCDR3
LANWDWYFDV

SEQ ID NO: 23706 - protein, 218 aa, Artificial Sequence; identical to SEQ ID NO: 22266
  Description of Artificial Sequence: Synthetic polypeptide
  XENP020534 7G8_H0.82_L0_IgG1_PVA_/S267K Light Chain

SEQ ID NO: 23707 - protein, 111 aa, Artificial Sequence; identical to SEQ ID NO: 22267
  Description of Artificial Sequence: Synthetic polypeptide
  VL of XENP020534

SEQ ID NO: 23708 - protein, 15 aa, Artificial Sequence
  Description of Artificial Sequence: Synthetic peptide
  XENP020534 vlCDR1
KASQSVDYDGDSYMN

SEQ ID NO: 23709 - protein, 7 aa, Artificial Sequence
  Description of Artificial Sequence: Synthetic peptide
  XENP020534 vlCDR2
AASNLES

SEQ ID NO: 23710 - protein, 9 aa, Artificial Sequence
  Description of Artificial Sequence: Synthetic peptide
  XENP020534 vlCDR3
QQSNEDPFT

SEQ ID NO: 23711 - protein, 450 aa, Artificial Sequence
  Description of Artificial Sequence: Synthetic polypeptide
  XENP020535 7G8_H0.83_L0_IgG1_PVA_/S267K Heavy Chain
EVKLEESGGGLVQPGGSMKLSCAASGFTFSDAWMDWVRQSPEKGLEWVAEIRTKANNDATYYAESVKGRFTISRDDSKSSVYLQMNSLRAEDTGIYYCTRLANWDWYFDVWGAGTTVTVSSASTKGPSVFPLAPSSKSTSGGTAALGCLVKDYFPEPVTVSWNSGALTSGVHTFPAVLQSSGLYSLSSVVTVPSSSLGTQTYICNVNHKPSDTKVDKKVEPKSCDKTHTCPPCPAPPVAGPSVFLFPPKPKDTLMISRTPEVTCVVVDVKHEDPEVKFNWYVDGVEVHNAKTKPREEEYNSTYRVVSVLTVLHQDWLNGKEYKCKVSNKALPAPIEKTISKAKGQPREPQVYTLPPSREEMTKNQVSLTCDVSGFYPSDIAVEWESDGQPENNYKTTPPVLDSDGSFFLYSKLTVDKSRWEQGDVFSCSVMHEALHNHYTQKSLSLSPGK

SEQ ID NO: 23712 - protein, 121 aa, Artificial Sequence
  Description of Artificial Sequence: Synthetic polypeptide
  VH of XENP020535
EVKLEESGGGLVQPGGSMKLSCAASGFTFSDAWMDWVRQSPEKGLEWVAEIRTKANNDATYYAESVKGRFTISRDDSKSSVYLQMNSLRAEDTGIYYCTRLANWDWYFDVWGAGTTVTVSS

SEQ ID NO: 23713 - protein, 5 aa, Artificial Sequence
  Description of Artificial Sequence: Synthetic peptide
  XENP020535 vhCDR1
DAWMD

SEQ ID NO: 23714 - protein, 19 aa, Artificial Sequence
  Description of Artificial Sequence: Synthetic peptide
  XENP020535 vhCDR2
EIRTKANNDATYYAESVKG

SEQ ID NO: 23715 - protein, 10 aa, Artificial Sequence
  Description of Artificial Sequence: Synthetic peptide
  XENP020535 vhCDR3
LANWDWYFDV

SEQ ID NO: 23716 - protein, 218 aa, Artificial Sequence; identical to SEQ ID NO: 22266
  Description of Artificial Sequence: Synthetic polypeptide
  XENP020535 7G8_H0.83_L0_IgG1_PVA_/S267K Light Chain

SEQ ID NO: 23717 - protein, 111 aa, Artificial Sequence; identical to SEQ ID NO: 22267
  Description of Artificial Sequence: Synthetic polypeptide
  VL of XENP020535

SEQ ID NO: 23718 - protein, 15 aa, Artificial Sequence
  Description of Artificial Sequence: Synthetic peptide
  XENP020535 vlCDR1
KASQSVDYDGDSYMN

SEQ ID NO: 23719 - protein, 7 aa, Artificial Sequence
  Description of Artificial Sequence: Synthetic peptide
  XENP020535 vlCDR2
AASNLES

SEQ ID NO: 23720 - protein, 9 aa, Artificial Sequence
  Description of Artificial Sequence: Synthetic peptide
  XENP020535 vlCDR3
QQSNEDPFT

SEQ ID NO: 23721 - protein, 450 aa, Artificial Sequence
  Description of Artificial Sequence: Synthetic polypeptide
  XENP020536 7G8_H0.84_L0_IgG1_PVA_/S267K Heavy Chain
EVKLEESGGGLVQPGGSMKLSCAASGFTFSDAWMDWVRQSPEKGLEWVAEIRTKANNFATYYAESVKGRFTISRDDSKSSVYLQMNSLRAEDTGIYYCTRLANWDWYFDVWGAGTTVTVSSASTKGPSVFPLAPSSKSTSGGTAALGCLVKDYFPEPVTVSWNSGALTSGVHTFPAVLQSSGLYSLSSVVTVPSSSLGTQTYICNVNHKPSDTKVDKKVEPKSCDKTHTCPPCPAPPVAGPSVFLFPPKPKDTLMISRTPEVTCVVVDVKHEDPEVKFNWYVDGVEVHNAKTKPREEEYNSTYRVVSVLTVLHQDWLNGKEYKCKVSNKALPAPIEKTISKAKGQPREPQVYTLPPSREEMTKNQVSLTCDVSGFYPSDIAVEWESDGQPENNYKTTPPVLDSDGSFFLYSKLTVDKSRWEQGDVFSCSVMHEALHNHYTQKSLSLSPGK

SEQ ID NO: 23722 - protein, 121 aa, Artificial Sequence
  Description of Artificial Sequence: Synthetic polypeptide
  VH of XENP020536
EVKLEESGGGLVQPGGSMKLSCAASGFTFSDAWMDWVRQSPEKGLEWVAEIRTKANNFATYYAESVKGRFTISRDDSKSSVYLQMNSLRAEDTGIYYCTRLANWDWYFDVWGAGTTVTVSS

SEQ ID NO: 23723 - protein, 5 aa, Artificial Sequence
  Description of Artificial Sequence: Synthetic peptide
  XENP020536 vhCDR1
DAWMD

SEQ ID NO: 23724 - protein, 19 aa, Artificial Sequence
  Description of Artificial Sequence: Synthetic peptide
  XENP020536 vhCDR2
EIRTKANNFATYYAESVKG

SEQ ID NO: 23725 - protein, 10 aa, Artificial Sequence
  Description of Artificial Sequence: Synthetic peptide
  XENP020536 vhCDR3
LANWDWYFDV

SEQ ID NO: 23726 - protein, 218 aa, Artificial Sequence; identical to SEQ ID NO: 22266
  Description of Artificial Sequence: Synthetic polypeptide
  XENP020536 7G8_H0.84_L0_IgG1_PVA_/S267K Light Chain

SEQ ID NO: 23727 - protein, 111 aa, Artificial Sequence; identical to SEQ ID NO: 22267
  Description of Artificial Sequence: Synthetic polypeptide
  VL of XENP020536

SEQ ID NO: 23728 - protein, 15 aa, Artificial Sequence
  Description of Artificial Sequence: Synthetic peptide
  XENP020536 vlCDR1
KASQSVDYDGDSYMN

SEQ ID NO: 23729 - protein, 7 aa, Artificial Sequence
  Description of Artificial Sequence: Synthetic peptide
  XENP020536 vlCDR2
AASNLES

SEQ ID NO: 23730 - protein, 9 aa, Artificial Sequence
  Description of Artificial Sequence: Synthetic peptide
  XENP020536 vlCDR3
QQSNEDPFT

SEQ ID NO: 23731 - protein, 450 aa, Artificial Sequence
  Description of Artificial Sequence: Synthetic polypeptide
  XENP020537 7G8_H0.85_L0_IgG1_PVA_/S267K Heavy Chain
EVKLEESGGGLVQPGGSMKLSCAASGFTFSDAWMDWVRQSPEKGLEWVAEIRTKANNAATYYAESVKGRFTISRDDSKSSVYLQMNSLRAEDTGIYYCTRLANWDWYFDVWGAGTTVTVSSASTKGPSVFPLAPSSKSTSGGTAALGCLVKDYFPEPVTVSWNSGALTSGVHTFPAVLQSSGLYSLSSVVTVPSSSLGTQTYICNVNHKPSDTKVDKKVEPKSCDKTHTCPPCPAPPVAGPSVFLFPPKPKDTLMISRTPEVTCVVVDVKHEDPEVKFNWYVDGVEVHNAKTKPREEEYNSTYRVVSVLTVLHQDWLNGKEYKCKVSNKALPAPIEKTISKAKGQPREPQVYTLPPSREEMTKNQVSLTCDVSGFYPSDIAVEWESDGQPENNYKTTPPVLDSDGSFFLYSKLTVDKSRWEQGDVFSCSVMHEALHNHYTQKSLSLSPGK

SEQ ID NO: 23732 - protein, 121 aa, Artificial Sequence
  Description of Artificial Sequence: Synthetic polypeptide
  VH of XENP020537
EVKLEESGGGLVQPGGSMKLSCAASGFTFSDAWMDWVRQSPEKGLEWVAEIRTKANNAATYYAESVKGRFTISRDDSKSSVYLQMNSLRAEDTGIYYCTRLANWDWYFDVWGAGTTVTVSS

SEQ ID NO: 23733 - protein, 5 aa, Artificial Sequence
  Description of Artificial Sequence: Synthetic peptide
  XENP020537 vhCDR1
DAWMD

SEQ ID NO: 23734 - protein, 19 aa, Artificial Sequence
  Description of Artificial Sequence: Synthetic peptide
  XENP020537 vhCDR2
EIRTKANNAATYYAESVKG

SEQ ID NO: 23735 - protein, 10 aa, Artificial Sequence
  Description of Artificial Sequence: Synthetic peptide
  XENP020537 vhCDR3
LANWDWYFDV

SEQ ID NO: 23736 - protein, 218 aa, Artificial Sequence; identical to SEQ ID NO: 22266
  Description of Artificial Sequence: Synthetic polypeptide
  XENP020537 7G8_H0.85_L0_IgG1_PVA_/S267K Light Chain

SEQ ID NO: 23737 - protein, 111 aa, Artificial Sequence; identical to SEQ ID NO: 22267
  Description of Artificial Sequence: Synthetic polypeptide
  VL of XENP020537

SEQ ID NO: 23738 - protein, 15 aa, Artificial Sequence
  Description of Artificial Sequence: Synthetic peptide
  XENP020537 vlCDR1
KASQSVDYDGDSYMN

SEQ ID NO: 23739 - protein, 7 aa, Artificial Sequence
  Description of Artificial Sequence: Synthetic peptide
  XENP020537 vlCDR2
AASNLES

SEQ ID NO: 23740 - protein, 9 aa, Artificial Sequence
  Description of Artificial Sequence: Synthetic peptide
  XENP020537 vlCDR3
QQSNEDPFT

SEQ ID NO: 23741 - protein, 450 aa, Artificial Sequence
  Description of Artificial Sequence: Synthetic polypeptide
  XENP020538 7G8_H0.86_L0_IgG1_PVA_/S267K Heavy Chain
EVKLEESGGGLVQPGGSMKLSCAASGFTFSDAWMDWVRQSPEKGLEWVAEIRTKANNKATYYAESVKGRFTISRDDSKSSVYLQMNSLRAEDTGIYYCTRLANWDWYFDVWGAGTTVTVSSASTKGPSVFPLAPSSKSTSGGTAALGCLVKDYFPEPVTVSWNSGALTSGVHTFPAVLQSSGLYSLSSVVTVPSSSLGTQTYICNVNHKPSDTKVDKKVEPKSCDKTHTCPPCPAPPVAGPSVFLFPPKPKDTLMISRTPEVTCVVVDVKHEDPEVKFNWYVDGVEVHNAKTKPREEEYNSTYRVVSVLTVLHQDWLNGKEYKCKVSNKALPAPIEKTISKAKGQPREPQVYTLPPSREEMTKNQVSLTCDVSGFYPSDIAVEWESDGQPENNYKTTPPVLDSDGSFFLYSKLTVDKSRWEQGDVFSCSVMHEALHNHYTQKSLSLSPGK

SEQ ID NO: 23742 - protein, 121 aa, Artificial Sequence
  Description of Artificial Sequence: Synthetic polypeptide
  VH of XENP020538
EVKLEESGGGLVQPGGSMKLSCAASGFTFSDAWMDWVRQSPEKGLEWVAEIRTKANNKATYYAESVKGRFTISRDDSKSSVYLQMNSLRAEDTGIYYCTRLANWDWYFDVWGAGTTVTVSS

SEQ ID NO: 23743 - protein, 5 aa, Artificial Sequence
  Description of Artificial Sequence: Synthetic peptide
  XENP020538 vhCDR1
DAWMD

SEQ ID NO: 23744 - protein, 19 aa, Artificial Sequence
  Description of Artificial Sequence: Synthetic peptide
  XENP020538 vhCDR2
EIRTKANNKATYYAESVKG

SEQ ID NO: 23745 - protein, 10 aa, Artificial Sequence
  Description of Artificial Sequence: Synthetic peptide
  XENP020538 vhCDR3
LANWDWYFDV

SEQ ID NO: 23746 - protein, 218 aa, Artificial Sequence; identical to SEQ ID NO: 22266
  Description of Artificial Sequence: Synthetic polypeptide
  XENP020538 7G8_H0.86_L0_IgG1_PVA_/S267K Light Chain

SEQ ID NO: 23747 - protein, 111 aa, Artificial Sequence; identical to SEQ ID NO: 22267
  Description of Artificial Sequence: Synthetic polypeptide
  VL of XENP020538

SEQ ID NO: 23748 - protein, 15 aa, Artificial Sequence
  Description of Artificial Sequence: Synthetic peptide
  XENP020538 vlCDR1
KASQSVDYDGDSYMN

SEQ ID NO: 23749 - protein, 7 aa, Artificial Sequence
  Description of Artificial Sequence: Synthetic peptide
  XENP020538 vlCDR2
AASNLES

SEQ ID NO: 23750 - protein, 9 aa, Artificial Sequence
  Description of Artificial Sequence: Synthetic peptide
  XENP020538 vlCDR3
QQSNEDPFT

SEQ ID NO: 23751 - protein, 450 aa, Artificial Sequence
  Description of Artificial Sequence: Synthetic polypeptide
  XENP020539 7G8_H0.87_L0_IgG1_PVA_/S267K Heavy Chain
EVKLEESGGGLVQPGGSMKLSCAASGFTFSDAWMDWVRQSPEKGLEWVAEIRTKANNGATYYAESVKGRFTISRDDSKSSVYLQMNSLRAEDTGIYYCTRLANWDWYFDVWGAGTTVTVSSASTKGPSVFPLAPSSKSTSGGTAALGCLVKDYFPEPVTVSWNSGALTSGVHTFPAVLQSSGLYSLSSVVTVPSSSLGTQTYICNVNHKPSDTKVDKKVEPKSCDKTHTCPPCPAPPVAGPSVFLFPPKPKDTLMISRTPEVTCVVVDVKHEDPEVKFNWYVDGVEVHNAKTKPREEEYNSTYRVVSVLTVLHQDWLNGKEYKCKVSNKALPAPIEKTISKAKGQPREPQVYTLPPSREEMTKNQVSLTCDVSGFYPSDIAVEWESDGQPENNYKTTPPVLDSDGSFFLYSKLTVDKSRWEQGDVFSCSVMHEALHNHYTQKSLSLSPGK

SEQ ID NO: 23752 - protein, 121 aa, Artificial Sequence
  Description of Artificial Sequence: Synthetic polypeptide
  VH of XENP020539
EVKLEESGGGLVQPGGSMKLSCAASGFTFSDAWMDWVRQSPEKGLEWVAEIRTKANNGATYYAESVKGRFTISRDDSKSSVYLQMNSLRAEDTGIYYCTRLANWDWYFDVWGAGTTVTVSS

SEQ ID NO: 23753 - protein, 5 aa, Artificial Sequence
  Description of Artificial Sequence: Synthetic peptide
  XENP020539 vhCDR1
DAWMD

SEQ ID NO: 23754 - protein, 19 aa, Artificial Sequence
  Description of Artificial Sequence: Synthetic peptide
  XENP020539 vhCDR2
EIRTKANNGATYYAESVKG

SEQ ID NO: 23755 - protein, 10 aa, Artificial Sequence
  Description of Artificial Sequence: Synthetic peptide
  XENP020539 vhCDR3
LANWDWYFDV

SEQ ID NO: 23756 - protein, 218 aa, Artificial Sequence; identical to SEQ ID NO: 22266
  Description of Artificial Sequence: Synthetic polypeptide
  XENP020539 7G8_H0.87_L0_IgG1_PVA_/S267K Light Chain

SEQ ID NO: 23757 - protein, 111 aa, Artificial Sequence; identical to SEQ ID NO: 22267
  Description of Artificial Sequence: Synthetic polypeptide
  VL of XENP020539

SEQ ID NO: 23758 - protein, 15 aa, Artificial Sequence
  Description of Artificial Sequence: Synthetic peptide
  XENP020539 vlCDR1
KASQSVDYDGDSYMN

SEQ ID NO: 23759 - protein, 7 aa, Artificial Sequence
  Description of Artificial Sequence: Synthetic peptide
  XENP020539 vlCDR2
AASNLES

SEQ ID NO: 23760 - protein, 9 aa, Artificial Sequence
  Description of Artificial Sequence: Synthetic peptide
  XENP020539 vlCDR3
QQSNEDPFT

SEQ ID NO: 23761 - protein, 450 aa, Artificial Sequence
  Description of Artificial Sequence: Synthetic polypeptide
  XENP020540 7G8_H0.88_L0_IgG1_PVA_/S267K Heavy Chain
EVKLEESGGGLVQPGGSMKLSCAASGFTFSDAWMDWVRQSPEKGLEWVAEIRTKANNLATYYAESVKGRFTISRDDSKSSVYLQMNSLRAEDTGIYYCTRLANWDWYFDVWGAGTTVTVSSASTKGPSVFPLAPSSKSTSGGTAALGCLVKDYFPEPVTVSWNSGALTSGVHTFPAVLQSSGLYSLSSVVTVPSSSLGTQTYICNVNHKPSDTKVDKKVEPKSCDKTHTCPPCPAPPVAGPSVFLFPPKPKDTLMISRTPEVTCVVVDVKHEDPEVKFNWYVDGVEVHNAKTKPREEEYNSTYRVVSVLTVLHQDWLNGKEYKCKVSNKALPAPIEKTISKAKGQPREPQVYTLPPSREEMTKNQVSLTCDVSGFYPSDIAVEWESDGQPENNYKTTPPVLDSDGSFFLYSKLTVDKSRWEQGDVFSCSVMHEALHNHYTQKSLSLSPGK

SEQ ID NO: 23762 - protein, 121 aa, Artificial Sequence
  Description of Artificial Sequence: Synthetic polypeptide
  VH of XENP020540
EVKLEESGGGLVQPGGSMKLSCAASGFTFSDAWMDWVRQSPEKGLEWVAEIRTKANNLATYYAESVKGRFTISRDDSKSSVYLQMNSLRAEDTGIYYCTRLANWDWYFDVWGAGTTVTVSS

SEQ ID NO: 23763 - protein, 5 aa, Artificial Sequence
  Description of Artificial Sequence: Synthetic peptide
  XENP020540 vhCDR1
DAWMD

SEQ ID NO: 23764 - protein, 19 aa, Artificial Sequence
  Description of Artificial Sequence: Synthetic peptide
  XENP020540 vhCDR2
EIRTKANNLATYYAESVKG

SEQ ID NO: 23765 - protein, 10 aa, Artificial Sequence
  Description of Artificial Sequence: Synthetic peptide
  XENP020540 vhCDR3
LANWDWYFDV

SEQ ID NO: 23766 - protein, 218 aa, Artificial Sequence; identical to SEQ ID NO: 22266
  Description of Artificial Sequence: Synthetic polypeptide
  XENP020540 7G8_H0.88_L0_IgG1_PVA_/S267K Light Chain

SEQ ID NO: 23767 - protein, 111 aa, Artificial Sequence; identical to SEQ ID NO: 22267
  Description of Artificial Sequence: Synthetic polypeptide
  VL of XENP020540

SEQ ID NO: 23768 - protein, 15 aa, Artificial Sequence
  Description of Artificial Sequence: Synthetic peptide
  XENP020540 vlCDR1
KASQSVDYDGDSYMN

SEQ ID NO: 23769 - protein, 7 aa, Artificial Sequence
  Description of Artificial Sequence: Synthetic peptide
  XENP020540 vlCDR2
AASNLES

SEQ ID NO: 23770 - protein, 9 aa, Artificial Sequence
  Description of Artificial Sequence: Synthetic peptide
  XENP020540 vlCDR3
QQSNEDPFT

SEQ ID NO: 23771 - protein, 450 aa, Artificial Sequence
  Description of Artificial Sequence: Synthetic polypeptide
  XENP020541 7G8_H0.89_L0_IgG1_PVA_/S267K Heavy Chain
EVKLEESGGGLVQPGGSMKLSCAASGFTFSDAWMDWVRQSPEKGLEWVAEIRTKANNHGTYYAESVKGRFTISRDDSKSSVYLQMNSLRAEDTGIYYCTRLANWDWYFDVWGAGTTVTVSSASTKGPSVFPLAPSSKSTSGGTAALGCLVKDYFPEPVTVSWNSGALTSGVHTFPAVLQSSGLYSLSSVVTVPSSSLGTQTYICNVNHKPSDTKVDKKVEPKSCDKTHTCPPCPAPPVAGPSVFLFPPKPKDTLMISRTPEVTCVVVDVKHEDPEVKFNWYVDGVEVHNAKTKPREEEYNSTYRVVSVLTVLHQDWLNGKEYKCKVSNKALPAPIEKTISKAKGQPREPQVYTLPPSREEMTKNQVSLTCDVSGFYPSDIAVEWESDGQPENNYKTTPPVLDSDGSFFLYSKLTVDKSRWEQGDVFSCSVMHEALHNHYTQKSLSLSPGK

SEQ ID NO: 23772 - protein, 121 aa, Artificial Sequence
  Description of Artificial Sequence: Synthetic polypeptide
  VH of XENP020541
EVKLEESGGGLVQPGGSMKLSCAASGFTFSDAWMDWVRQSPEKGLEWVAEIRTKANNHGTYYAESVKGRFTISRDDSKSSVYLQMNSLRAEDTGIYYCTRLANWDWYFDVWGAGTTVTVSS

SEQ ID NO: 23773 - protein, 5 aa, Artificial Sequence
  Description of Artificial Sequence: Synthetic peptide
  XENP020541 vhCDR1
DAWMD

SEQ ID NO: 23774 - protein, 19 aa, Artificial Sequence
  Description of Artificial Sequence: Synthetic peptide
  XENP020541 vhCDR2
EIRTKANNHGTYYAESVKG

SEQ ID NO: 23775 - protein, 10 aa, Artificial Sequence
  Description of Artificial Sequence: Synthetic peptide
  XENP020541 vhCDR3
LANWDWYFDV

SEQ ID NO: 23776 - protein, 218 aa, Artificial Sequence; identical to SEQ ID NO: 22266
  Description of Artificial Sequence: Synthetic polypeptide
  XENP020541 7G8_H0.89_L0_IgG1_PVA_/S267K Light Chain

SEQ ID NO: 23777 - protein, 111 aa, Artificial Sequence; identical to SEQ ID NO: 22267
  Description of Artificial Sequence: Synthetic polypeptide
  VL of XENP020541

SEQ ID NO: 23778 - protein, 15 aa, Artificial Sequence
  Description of Artificial Sequence: Synthetic peptide
  XENP020541 vlCDR1
KASQSVDYDGDSYMN

SEQ ID NO: 23779 - protein, 7 aa, Artificial Sequence
  Description of Artificial Sequence: Synthetic peptide
  XENP020541 vlCDR2
AASNLES

SEQ ID NO: 23780 - protein, 9 aa, Artificial Sequence
  Description of Artificial Sequence: Synthetic peptide
  XENP020541 vlCDR3
QQSNEDPFT

SEQ ID NO: 23781 - protein, 450 aa, Artificial Sequence
  Description of Artificial Sequence: Synthetic polypeptide
  XENP020542 7G8_H0.90_L0_IgG1_PVA_/S267K Heavy Chain
EVKLEESGGGLVQPGGSMKLSCAASGFTFSDAWMDWVRQSPEKGLEWVAEIRTKANNHHTYYAESVKGRFTISRDDSKSSVYLQMNSLRAEDTGIYYCTRLANWDWYFDVWGAGTTVTVSSASTKGPSVFPLAPSSKSTSGGTAALGCLVKDYFPEPVTVSWNSGALTSGVHTFPAVLQSSGLYSLSSVVTVPSSSLGTQTYICNVNHKPSDTKVDKKVEPKSCDKTHTCPPCPAPPVAGPSVFLFPPKPKDTLMISRTPEVTCVVVDVKHEDPEVKFNWYVDGVEVHNAKTKPREEEYNSTYRVVSVLTVLHQDWLNGKEYKCKVSNKALPAPIEKTISKAKGQPREPQVYTLPPSREEMTKNQVSLTCDVSGFYPSDIAVEWESDGQPENNYKTTPPVLDSDGSFFLYSKLTVDKSRWEQGDVFSCSVMHEALHNHYTQKSLSLSPGK

SEQ ID NO: 23782 - protein, 121 aa, Artificial Sequence
  Description of Artificial Sequence: Synthetic polypeptide
  VH of XENP020542
EVKLEESGGGLVQPGGSMKLSCAASGFTFSDAWMDWVRQSPEKGLEWVAEIRTKANNHHTYYAESVKGRFTISRDDSKSSVYLQMNSLRAEDTGIYYCTRLANWDWYFDVWGAGTTVTVSS

SEQ ID NO: 23783 - protein, 5 aa, Artificial Sequence
  Description of Artificial Sequence: Synthetic peptide
  XENP020542 vhCDR1
DAWMD

SEQ ID NO: 23784 - protein, 19 aa, Artificial Sequence
  Description of Artificial Sequence: Synthetic peptide
  XENP020542 vhCDR2
EIRTKANNHHTYYAESVKG

SEQ ID NO: 23785 - protein, 10 aa, Artificial Sequence
  Description of Artificial Sequence: Synthetic peptide
  XENP020542 vhCDR3
LANWDWYFDV

SEQ ID NO: 23786 - protein, 218 aa, Artificial Sequence; identical to SEQ ID NO: 22266
  Description of Artificial Sequence: Synthetic polypeptide
  XENP020542 7G8_H0.90_L0_IgG1_PVA_/S267K Light Chain

SEQ ID NO: 23787 - protein, 111 aa, Artificial Sequence; identical to SEQ ID NO: 22267
  Description of Artificial Sequence: Synthetic polypeptide
  VL of XENP020542

SEQ ID NO: 23788 - protein, 15 aa, Artificial Sequence
  Description of Artificial Sequence: Synthetic peptide
  XENP020542 vlCDR1
KASQSVDYDGDSYMN

SEQ ID NO: 23789 - protein, 7 aa, Artificial Sequence
  Description of Artificial Sequence: Synthetic peptide
  XENP020542 vlCDR2
AASNLES

SEQ ID NO: 23790 - protein, 9 aa, Artificial Sequence
  Description of Artificial Sequence: Synthetic peptide
  XENP020542 vlCDR3
QQSNEDPFT

SEQ ID NO: 23791 - protein, 450 aa, Artificial Sequence
  Description of Artificial Sequence: Synthetic polypeptide
  XENP020543 7G8_H0.91_L0_IgG1_PVA_/S267K Heavy Chain
EVKLEESGGGLVQPGGSMKLSCAASGFTFSDAWMDWVRQSPEKGLEWVAEIRTKANNHQTYYAESVKGRFTISRDDSKSSVYLQMNSLRAEDTGIYYCTRLANWDWYFDVWGAGTTVTVSSASTKGPSVFPLAPSSKSTSGGTAALGCLVKDYFPEPVTVSWNSGALTSGVHTFPAVLQSSGLYSLSSVVTVPSSSLGTQTYICNVNHKPSDTKVDKKVEPKSCDKTHTCPPCPAPPVAGPSVFLFPPKPKDTLMISRTPEVTCVVVDVKHEDPEVKFNWYVDGVEVHNAKTKPREEEYNSTYRVVSVLTVLHQDWLNGKEYKCKVSNKALPAPIEKTISKAKGQPREPQVYTLPPSREEMTKNQVSLTCDVSGFYPSDIAVEWESDGQPENNYKTTPPVLDSDGSFFLYSKLTVDKSRWEQGDVFSCSVMHEALHNHYTQKSLSLSPGK

SEQ ID NO: 23792 - protein, 121 aa, Artificial Sequence
  Description of Artificial Sequence: Synthetic polypeptide
  VH of XENP020543
EVKLEESGGGLVQPGGSMKLSCAASGFTFSDAWMDWVRQSPEKGLEWVAEIRTKANNHQTYYAESVKGRFTISRDDSKSSVYLQMNSLRAEDTGIYYCTRLANWDWYFDVWGAGTTVTVSS

SEQ ID NO: 23793 - protein, 5 aa, Artificial Sequence
  Description of Artificial Sequence: Synthetic peptide
  XENP020543 vhCDR1
DAWMD

SEQ ID NO: 23794 - protein, 19 aa, Artificial Sequence
  Description of Artificial Sequence: Synthetic peptide
  XENP020543 vhCDR2
EIRTKANNHQTYYAESVKG

SEQ ID NO: 23795 - protein, 10 aa, Artificial Sequence
  Description of Artificial Sequence: Synthetic peptide
  XENP020543 vhCDR3
LANWDWYFDV

SEQ ID NO: 23796 - protein, 218 aa, Artificial Sequence; identical to SEQ ID NO: 22266
  Description of Artificial Sequence: Synthetic polypeptide
  XENP020543 7G8_H0.91_L0_IgG1_PVA_/S267K Light Chain

SEQ ID NO: 23797 - protein, 111 aa, Artificial Sequence; identical to SEQ ID NO: 22267
  Description of Artificial Sequence: Synthetic polypeptide
  VL of XENP020543

SEQ ID NO: 23798 - protein, 15 aa, Artificial Sequence
  Description of Artificial Sequence: Synthetic peptide
  XENP020543 vlCDR1
KASQSVDYDGDSYMN

SEQ ID NO: 23799 - protein, 7 aa, Artificial Sequence
  Description of Artificial Sequence: Synthetic peptide
  XENP020543 vlCDR2
AASNLES

SEQ ID NO: 23800 - protein, 9 aa, Artificial Sequence
  Description of Artificial Sequence: Synthetic peptide
  XENP020543 vlCDR3
QQSNEDPFT

SEQ ID NO: 23801 - protein, 450 aa, Artificial Sequence
  Description of Artificial Sequence: Synthetic polypeptide
  XENP020544 7G8_H0.92_L0_IgG1_PVA_/S267K Heavy Chain
EVKLEESGGGLVQPGGSMKLSCAASGFTFSDAWMDWVRQSPEKGLEWVAEIRTKANNHDTYYAESVKGRFTISRDDSKSSVYLQMNSLRAEDTGIYYCTRLANWDWYFDVWGAGTTVTVSSASTKGPSVFPLAPSSKSTSGGTAALGCLVKDYFPEPVTVSWNSGALTSGVHTFPAVLQSSGLYSLSSVVTVPSSSLGTQTYICNVNHKPSDTKVDKKVEPKSCDKTHTCPPCPAPPVAGPSVFLFPPKPKDTLMISRTPEVTCVVVDVKHEDPEVKFNWYVDGVEVHNAKTKPREEEYNSTYRVVSVLTVLHQDWLNGKEYKCKVSNKALPAPIEKTISKAKGQPREPQVYTLPPSREEMTKNQVSLTCDVSGFYPSDIAVEWESDGQPENNYKTTPPVLDSDGSFFLYSKLTVDKSRWEQGDVFSCSVMHEALHNHYTQKSLSLSPGK

SEQ ID NO: 23802 - protein, 121 aa, Artificial Sequence
  Description of Artificial Sequence: Synthetic polypeptide
  VH of XENP020544
EVKLEESGGGLVQPGGSMKLSCAASGFTFSDAWMDWVRQSPEKGLEWVAEIRTKANNHDTYYAESVKGRFTISRDDSKSSVYLQMNSLRAEDTGIYYCTRLANWDWYFDVWGAGTTVTVSS

SEQ ID NO: 23803 - protein, 5 aa, Artificial Sequence
  Description of Artificial Sequence: Synthetic peptide
  XENP020544 vhCDR1
DAWMD

SEQ ID NO: 23804 - protein, 19 aa, Artificial Sequence
  Description of Artificial Sequence: Synthetic peptide
  XENP020544 vhCDR2
EIRTKANNHDTYYAESVKG

SEQ ID NO: 23805 - protein, 10 aa, Artificial Sequence
  Description of Artificial Sequence: Synthetic peptide
  XENP020544 vhCDR3
LANWDWYFDV

SEQ ID NO: 23806 - protein, 218 aa, Artificial Sequence; identical to SEQ ID NO: 22266
  Description of Artificial Sequence: Synthetic polypeptide
  XENP020544 7G8_H0.92_L0_IgG1_PVA_/S267K Light Chain

SEQ ID NO: 23807 - protein, 111 aa, Artificial Sequence; identical to SEQ ID NO: 22267
  Description of Artificial Sequence: Synthetic polypeptide
  VL of XENP020544

SEQ ID NO: 23808 - protein, 15 aa, Artificial Sequence
  Description of Artificial Sequence: Synthetic peptide
  XENP020544 vlCDR1
KASQSVDYDGDSYMN

SEQ ID NO: 23809 - protein, 7 aa, Artificial Sequence
  Description of Artificial Sequence: Synthetic peptide
  XENP020544 vlCDR2
AASNLES

SEQ ID NO: 23810 - protein, 9 aa, Artificial Sequence
  Description of Artificial Sequence: Synthetic peptide
  XENP020544 vlCDR3
QQSNEDPFT

SEQ ID NO: 23811 - protein, 450 aa, Artificial Sequence
  Description of Artificial Sequence: Synthetic polypeptide
  XENP020545 7G8_H0.93_L0_IgG1_PVA_/S267K Heavy Chain
EVKLEESGGGLVQPGGSMKLSCAASGFTFSDAWMDWVRQSPEKGLEWVAEIRTKANNHLTYYAESVKGRFTISRDDSKSSVYLQMNSLRAEDTGIYYCTRLANWDWYFDVWGAGTTVTVSSASTKGPSVFPLAPSSKSTSGGTAALGCLVKDYFPEPVTVSWNSGALTSGVHTFPAVLQSSGLYSLSSVVTVPSSSLGTQTYICNVNHKPSDTKVDKKVEPKSCDKTHTCPPCPAPPVAGPSVFLFPPKPKDTLMISRTPEVTCVVVDVKHEDPEVKFNWYVDGVEVHNAKTKPREEEYNSTYRVVSVLTVLHQDWLNGKEYKCKVSNKALPAPIEKTISKAKGQPREPQVYTLPPSREEMTKNQVSLTCDVSGFYPSDIAVEWESDGQPENNYKTTPPVLDSDGSFFLYSKLTVDKSRWEQGDVFSCSVMHEALHNHYTQKSLSLSPGK

SEQ ID NO: 23812 - protein, 121 aa, Artificial Sequence
  Description of Artificial Sequence: Synthetic polypeptide
  VH of XENP020545
EVKLEESGGGLVQPGGSMKLSCAASGFTFSDAWMDWVRQSPEKGLEWVAEIRTKANNHLTYYAESVKGRFTISRDDSKSSVYLQMNSLRAEDTGIYYCTRLANWDWYFDVWGAGTTVTVSS

SEQ ID NO: 23813 - protein, 5 aa, Artificial Sequence
  Description of Artificial Sequence: Synthetic peptide
  XENP020545 vhCDR1
DAWMD

SEQ ID NO: 23814 - protein, 19 aa, Artificial Sequence
  Description of Artificial Sequence: Synthetic peptide
  XENP020545 vhCDR2
EIRTKANNHLTYYAESVKG

SEQ ID NO: 23815 - protein, 10 aa, Artificial Sequence
  Description of Artificial Sequence: Synthetic peptide
  XENP020545 vhCDR3
LANWDWYFDV

SEQ ID NO: 23816 - protein, 218 aa, Artificial Sequence; identical to SEQ ID NO: 22266
  Description of Artificial Sequence: Synthetic polypeptide
  XENP020545 7G8_H0.93_L0_IgG1_PVA_/S267K Light Chain

SEQ ID NO: 23817 - protein, 111 aa, Artificial Sequence; identical to SEQ ID NO: 22267
  Description of Artificial Sequence: Synthetic polypeptide
  VL of XENP020545

SEQ ID NO: 23818 - protein, 15 aa, Artificial Sequence
  Description of Artificial Sequence: Synthetic peptide
  XENP020545 vlCDR1
KASQSVDYDGDSYMN

SEQ ID NO: 23819 - protein, 7 aa, Artificial Sequence
  Description of Artificial Sequence: Synthetic peptide
  XENP020545 vlCDR2
AASNLES

SEQ ID NO: 23820 - protein, 9 aa, Artificial Sequence
  Description of Artificial Sequence: Synthetic peptide
  XENP020545 vlCDR3
QQSNEDPFT

SEQ ID NO: 23821 - protein, 450 aa, Artificial Sequence
  Description of Artificial Sequence: Synthetic polypeptide
  XENP020546 7G8_H0.94_L0_IgG1_PVA_/S267K Heavy Chain
EVKLEESGGGLVQPGGSMKLSCAASGFTFSDAWMDWVRQSPEKGLEWVAEIRTKANNHKTYYAESVKGRFTISRDDSKSSVYLQMNSLRAEDTGIYYCTRLANWDWYFDVWGAGTTVTVSSASTKGPSVFPLAPSSKSTSGGTAALGCLVKDYFPEPVTVSWNSGALTSGVHTFPAVLQSSGLYSLSSVVTVPSSSLGTQTYICNVNHKPSDTKVDKKVEPKSCDKTHTCPPCPAPPVAGPSVFLFPPKPKDTLMISRTPEVTCVVVDVKHEDPEVKFNWYVDGVEVHNAKTKPREEEYNSTYRVVSVLTVLHQDWLNGKEYKCKVSNKALPAPIEKTISKAKGQPREPQVYTLPPSREEMTKNQVSLTCDVSGFYPSDIAVEWESDGQPENNYKTTPPVLDSDGSFFLYSKLTVDKSRWEQGDVFSCSVMHEALHNHYTQKSLSLSPGK

SEQ ID NO: 23822 - protein, 121 aa, Artificial Sequence
  Description of Artificial Sequence: Synthetic polypeptide
  VH of XENP020546
EVKLEESGGGLVQPGGSMKLSCAASGFTFSDAWMDWVRQSPEKGLEWVAEIRTKANNHKTYYAESVKGRFTISRDDSKSSVYLQMNSLRAEDTGIYYCTRLANWDWYFDVWGAGTTVTVSS

SEQ ID NO: 23823 - protein, 5 aa, Artificial Sequence
  Description of Artificial Sequence: Synthetic peptide
  XENP020546 vhCDR1
DAWMD

SEQ ID NO: 23824 - protein, 19 aa, Artificial Sequence
  Description of Artificial Sequence: Synthetic peptide
  XENP020546 vhCDR2
EIRTKANNHKTYYAESVKG

SEQ ID NO: 23825 - protein, 10 aa, Artificial Sequence
  Description of Artificial Sequence: Synthetic peptide
  XENP020546 vhCDR3
LANWDWYFDV

SEQ ID NO: 23826 - protein, 218 aa, Artificial Sequence; identical to SEQ ID NO: 22266
  Description of Artificial Sequence: Synthetic polypeptide
  XENP020546 7G8_H0.94_L0_IgG1_PVA_/S267K Light Chain

SEQ ID NO: 23827 - protein, 111 aa, Artificial Sequence; identical to SEQ ID NO: 22267
  Description of Artificial Sequence: Synthetic polypeptide
  VL of XENP020546

SEQ ID NO: 23828 - protein, 15 aa, Artificial Sequence
  Description of Artificial Sequence: Synthetic peptide
  XENP020546 vlCDR1
KASQSVDYDGDSYMN

SEQ ID NO: 23829 - protein, 7 aa, Artificial Sequence
  Description of Artificial Sequence: Synthetic peptide
  XENP020546 vlCDR2
AASNLES

SEQ ID NO: 23830 - protein, 9 aa, Artificial Sequence
  Description of Artificial Sequence: Synthetic peptide
  XENP020546 vlCDR3
QQSNEDPFT

SEQ ID NO: 23831 - protein, 450 aa, Artificial Sequence
  Description of Artificial Sequence: Synthetic polypeptide
  XENP020547 7G8_H0.95_L0_IgG1_PVA_/S267K Heavy Chain
EVKLEESGGGLVQPGGSMKLSCAASGFTFSDAWMDWVRQSPEKGLEWVAEIRTKANNHYTYYAESVKGRFTISRDDSKSSVYLQMNSLRAEDTGIYYCTRLANWDWYFDVWGAGTTVTVSSASTKGPSVFPLAPSSKSTSGGTAALGCLVKDYFPEPVTVSWNSGALTSGVHTFPAVLQSSGLYSLSSVVTVPSSSLGTQTYICNVNHKPSDTKVDKKVEPKSCDKTHTCPPCPAPPVAGPSVFLFPPKPKDTLMISRTPEVTCVVVDVKHEDPEVKFNWYVDGVEVHNAKTKPREEEYNSTYRVVSVLTVLHQDWLNGKEYKCKVSNKALPAPIEKTISKAKGQPREPQVYTLPPSREEMTKNQVSLTCDVSGFYPSDIAVEWESDGQPENNYKTTPPVLDSDGSFFLYSKLTVDKSRWEQGDVFSCSVMHEALHNHYTQKSLSLSPGK

SEQ ID NO: 23832 - protein, 121 aa, Artificial Sequence
  Description of Artificial Sequence: Synthetic polypeptide
  VH of XENP020547
EVKLEESGGGLVQPGGSMKLSCAASGFTFSDAWMDWVRQSPEKGLEWVAEIRTKANNHYTYYAESVKGRFTISRDDSKSSVYLQMNSLRAEDTGIYYCTRLANWDWYFDVWGAGTTVTVSS

SEQ ID NO: 23833 - protein, 5 aa, Artificial Sequence
  Description of Artificial Sequence: Synthetic peptide
  XENP020547 vhCDR1
DAWMD

SEQ ID NO: 23834 - protein, 19 aa, Artificial Sequence
  Description of Artificial Sequence: Synthetic peptide
  XENP020547 vhCDR2
EIRTKANNHYTYYAESVKG

SEQ ID NO: 23835 - protein, 10 aa, Artificial Sequence
  Description of Artificial Sequence: Synthetic peptide
  XENP020547 vhCDR3
LANWDWYFDV

SEQ ID NO: 23836 - protein, 218 aa, Artificial Sequence; identical to SEQ ID NO: 22266
  Description of Artificial Sequence: Synthetic polypeptide
  XENP020547 7G8_H0.95_L0_IgG1_PVA_/S267K Light Chain

SEQ ID NO: 23837 - protein, 111 aa, Artificial Sequence; identical to SEQ ID NO: 22267
  Description of Artificial Sequence: Synthetic polypeptide
  VL of XENP020547

SEQ ID NO: 23838 - protein, 15 aa, Artificial Sequence
  Description of Artificial Sequence: Synthetic peptide
  XENP020547 vlCDR1
KASQSVDYDGDSYMN

SEQ ID NO: 23839 - protein, 7 aa, Artificial Sequence
  Description of Artificial Sequence: Synthetic peptide
  XENP020547 vlCDR2
AASNLES

SEQ ID NO: 23840 - protein, 9 aa, Artificial Sequence
  Description of Artificial Sequence: Synthetic peptide
  XENP020547 vlCDR3
QQSNEDPFT

SEQ ID NO: 23841 - protein, 450 aa, Artificial Sequence
  Description of Artificial Sequence: Synthetic polypeptide
  XENP020548 7G8_H0.96_L0_IgG1_PVA_/S267K Heavy Chain
EVKLEESGGGLVQPGGSMKLSCAASGFTFSDAWMDWVRQSPEKGLEWVAEIRTKANNHATFYAESVKGRFTISRDDSKSSVYLQMNSLRAEDTGIYYCTRLANWDWYFDVWGAGTTVTVSSASTKGPSVFPLAPSSKSTSGGTAALGCLVKDYFPEPVTVSWNSGALTSGVHTFPAVLQSSGLYSLSSVVTVPSSSLGTQTYICNVNHKPSDTKVDKKVEPKSCDKTHTCPPCPAPPVAGPSVFLFPPKPKDTLMISRTPEVTCVVVDVKHEDPEVKFNWYVDGVEVHNAKTKPREEEYNSTYRVVSVLTVLHQDWLNGKEYKCKVSNKALPAPIEKTISKAKGQPREPQVYTLPPSREEMTKNQVSLTCDVSGFYPSDIAVEWESDGQPENNYKTTPPVLDSDGSFFLYSKLTVDKSRWEQGDVFSCSVMHEALHNHYTQKSLSLSPGK

SEQ ID NO: 23842 - protein, 121 aa, Artificial Sequence
  Description of Artificial Sequence: Synthetic polypeptide
  VH of XENP020548
EVKLEESGGGLVQPGGSMKLSCAASGFTFSDAWMDWVRQSPEKGLEWVAEIRTKANNHATFYAESVKGRFTISRDDSKSSVYLQMNSLRAEDTGIYYCTRLANWDWYFDVWGAGTTVTVSS

SEQ ID NO: 23843 - protein, 5 aa, Artificial Sequence
  Description of Artificial Sequence: Synthetic peptide
  XENP020548 vhCDR1
DAWMD

SEQ ID NO: 23844 - protein, 19 aa, Artificial Sequence
  Description of Artificial Sequence: Synthetic peptide
  XENP020548 vhCDR2
EIRTKANNHATFYAESVKG

SEQ ID NO: 23845 - protein, 10 aa, Artificial Sequence
  Description of Artificial Sequence: Synthetic peptide
  XENP020548 vhCDR3
LANWDWYFDV

SEQ ID NO: 23846 - protein, 218 aa, Artificial Sequence; identical to SEQ ID NO: 22266
  Description of Artificial Sequence: Synthetic polypeptide
  XENP020548 7G8_H0.96_L0_IgG1_PVA_/S267K Light Chain

SEQ ID NO: 23847 - protein, 111 aa, Artificial Sequence; identical to SEQ ID NO: 22267
  Description of Artificial Sequence: Synthetic polypeptide
  VL of XENP020548

SEQ ID NO: 23848 - protein, 15 aa, Artificial Sequence
  Description of Artificial Sequence: Synthetic peptide
  XENP020548 vlCDR1
KASQSVDYDGDSYMN

SEQ ID NO: 23849 - protein, 7 aa, Artificial Sequence
  Description of Artificial Sequence: Synthetic peptide
  XENP020548 vlCDR2
AASNLES

SEQ ID NO: 23850 - protein, 9 aa, Artificial Sequence
  Description of Artificial Sequence: Synthetic peptide
  XENP020548 vlCDR3
QQSNEDPFT

SEQ ID NO: 23851 - protein, 450 aa, Artificial Sequence
  Description of Artificial Sequence: Synthetic polypeptide
  XENP020549 7G8_H0.97_L0_IgG1_PVA_/S267K Heavy Chain
EVKLEESGGGLVQPGGSMKLSCAASGFTFSDAWMDWVRQSPEKGLEWVAEIRTKANNHATHYAESVKGRFTISRDDSKSSVYLQMNSLRAEDTGIYYCTRLANWDWYFDVWGAGTTVTVSSASTKGPSVFPLAPSSKSTSGGTAALGCLVKDYFPEPVTVSWNSGALTSGVHTFPAVLQSSGLYSLSSVVTVPSSSLGTQTYICNVNHKPSDTKVDKKVEPKSCDKTHTCPPCPAPPVAGPSVFLFPPKPKDTLMISRTPEVTCVVVDVKHEDPEVKFNWYVDGVEVHNAKTKPREEEYNSTYRVVSVLTVLHQDWLNGKEYKCKVSNKALPAPIEKTISKAKGQPREPQVYTLPPSREEMTKNQVSLTCDVSGFYPSDIAVEWESDGQPENNYKTTPPVLDSDGSFFLYSKLTVDKSRWEQGDVFSCSVMHEALHNHYTQKSLSLSPGK

SEQ ID NO: 23852 - protein, 121 aa, Artificial Sequence
  Description of Artificial Sequence: Synthetic polypeptide
  VH of XENP020549
EVKLEESGGGLVQPGGSMKLSCAASGFTFSDAWMDWVRQSPEKGLEWVAEIRTKANNHATHYAESVKGRFTISRDDSKSSVYLQMNSLRAEDTGIYYCTRLANWDWYFDVWGAGTTVTVSS

SEQ ID NO: 23853 - protein, 5 aa, Artificial Sequence
  Description of Artificial Sequence: Synthetic peptide
  XENP020549 vhCDR1
DAWMD

SEQ ID NO: 23854 - protein, 19 aa, Artificial Sequence
  Description of Artificial Sequence: Synthetic peptide
  XENP020549 vhCDR2
EIRTKANNHATHYAESVKG

SEQ ID NO: 23855 - protein, 10 aa, Artificial Sequence
  Description of Artificial Sequence: Synthetic peptide
  XENP020549 vhCDR3
LANWDWYFDV

SEQ ID NO: 23856 - protein, 218 aa, Artificial Sequence; identical to SEQ ID NO: 22266
  Description of Artificial Sequence: Synthetic polypeptide
  XENP020549 7G8_H0.97_L0_IgG1_PVA_/S267K Light Chain

SEQ ID NO: 23857 - protein, 111 aa, Artificial Sequence; identical to SEQ ID NO: 22267
  Description of Artificial Sequence: Synthetic polypeptide
  VL of XENP020549

SEQ ID NO: 23858 - protein, 15 aa, Artificial Sequence
  Description of Artificial Sequence: Synthetic peptide
  XENP020549 vlCDR1
KASQSVDYDGDSYMN

SEQ ID NO: 23859 - protein, 7 aa, Artificial Sequence
  Description of Artificial Sequence: Synthetic peptide
  XENP020549 vlCDR2
AASNLES

SEQ ID NO: 23860 - protein, 9 aa, Artificial Sequence
  Description of Artificial Sequence: Synthetic peptide
  XENP020549 vlCDR3
QQSNEDPFT

SEQ ID NO: 23861 - protein, 450 aa, Artificial Sequence
  Description of Artificial Sequence: Synthetic polypeptide
  XENP020550 7G8_H0.98_L0_IgG1_PVA_/S267K Heavy Chain
EVKLEESGGGLVQPGGSMKLSCAASGFTFSDAWMDWVRQSPEKGLEWVAEIRTKANNHATLYAESVKGRFTISRDDSKSSVYLQMNSLRAEDTGIYYCTRLANWDWYFDVWGAGTTVTVSSASTKGPSVFPLAPSSKSTSGGTAALGCLVKDYFPEPVTVSWNSGALTSGVHTFPAVLQSSGLYSLSSVVTVPSSSLGTQTYICNVNHKPSDTKVDKKVEPKSCDKTHTCPPCPAPPVAGPSVFLFPPKPKDTLMISRTPEVTCVVVDVKHEDPEVKFNWYVDGVEVHNAKTKPREEEYNSTYRVVSVLTVLHQDWLNGKEYKCKVSNKALPAPIEKTISKAKGQPREPQVYTLPPSREEMTKNQVSLTCDVSGFYPSDIAVEWESDGQPENNYKTTPPVLDSDGSFFLYSKLTVDKSRWEQGDVFSCSVMHEALHNHYTQKSLSLSPGK

SEQ ID NO: 23862 - protein, 121 aa, Artificial Sequence
  Description of Artificial Sequence: Synthetic polypeptide
  VH of XENP020550
EVKLEESGGGLVQPGGSMKLSCAASGFTFSDAWMDWVRQSPEKGLEWVAEIRTKANNHATLYAESVKGRFTISRDDSKSSVYLQMNSLRAEDTGIYYCTRLANWDWYFDVWGAGTTVTVSS

SEQ ID NO: 23863 - protein, 5 aa, Artificial Sequence
  Description of Artificial Sequence: Synthetic peptide
  XENP020550 vhCDR1
DAWMD

SEQ ID NO: 23864 - protein, 19 aa, Artificial Sequence
  Description of Artificial Sequence: Synthetic peptide
  XENP020550 vhCDR2
EIRTKANNHATLYAESVKG

SEQ ID NO: 23865 - protein, 10 aa, Artificial Sequence
  Description of Artificial Sequence: Synthetic peptide
  XENP020550 vhCDR3
LANWDWYFDV

SEQ ID NO: 23866 - protein, 218 aa, Artificial Sequence; identical to SEQ ID NO: 22266
  Description of Artificial Sequence: Synthetic polypeptide
  XENP020550 7G8_H0.98_L0_IgG1_PVA_/S267K Light Chain

SEQ ID NO: 23867 - protein, 111 aa, Artificial Sequence; identical to SEQ ID NO: 22267
  Description of Artificial Sequence: Synthetic polypeptide
  VL of XENP020550

SEQ ID NO: 23868 - protein, 15 aa, Artificial Sequence
  Description of Artificial Sequence: Synthetic peptide
  XENP020550 vlCDR1
KASQSVDYDGDSYMN

SEQ ID NO: 23869 - protein, 7 aa, Artificial Sequence
  Description of Artificial Sequence: Synthetic peptide
  XENP020550 vlCDR2
AASNLES

SEQ ID NO: 23870 - protein, 9 aa, Artificial Sequence
  Description of Artificial Sequence: Synthetic peptide
  XENP020550 vlCDR3
QQSNEDPFT

SEQ ID NO: 23871 - protein, 450 aa, Artificial Sequence
  Description of Artificial Sequence: Synthetic polypeptide
  XENP020551 7G8_H0.99_L0_IgG1_PVA_/S267K Heavy Chain
EVKLEESGGGLVQPGGSMKLSCAASGFTFSDAWMDWVRQSPEKGLEWVAEIRTKANNHATWYAESVKGRFTISRDDSKSSVYLQMNSLRAEDTGIYYCTRLANWDWYFDVWGAGTTVTVSSASTKGPSVFPLAPSSKSTSGGTAALGCLVKDYFPEPVTVSWNSGALTSGVHTFPAVLQSSGLYSLSSVVTVPSSSLGTQTYICNVNHKPSDTKVDKKVEPKSCDKTHTCPPCPAPPVAGPSVFLFPPKPKDTLMISRTPEVTCVVVDVKHEDPEVKFNWYVDGVEVHNAKTKPREEEYNSTYRVVSVLTVLHQDWLNGKEYKCKVSNKALPAPIEKTISKAKGQPREPQVYTLPPSREEMTKNQVSLTCDVSGFYPSDIAVEWESDGQPENNYKTTPPVLDSDGSFFLYSKLTVDKSRWEQGDVFSCSVMHEALHNHYTQKSLSLSPGK

SEQ ID NO: 23872 - protein, 121 aa, Artificial Sequence
  Description of Artificial Sequence: Synthetic polypeptide
  VH of XENP020551
EVKLEESGGGLVQPGGSMKLSCAASGFTFSDAWMDWVRQSPEKGLEWVAEIRTKANNHATWYAESVKGRFTISRDDSKSSVYLQMNSLRAEDTGIYYCTRLANWDWYFDVWGAGTTVTVSS

SEQ ID NO: 23873 - protein, 5 aa, Artificial Sequence
  Description of Artificial Sequence: Synthetic peptide
  XENP020551 vhCDR1
DAWMD

SEQ ID NO: 23874 - protein, 19 aa, Artificial Sequence
  Description of Artificial Sequence: Synthetic peptide
  XENP020551 vhCDR2
EIRTKANNHATWYAESVKG

SEQ ID NO: 23875 - protein, 10 aa, Artificial Sequence
  Description of Artificial Sequence: Synthetic peptide
  XENP020551 vhCDR3
LANWDWYFDV

SEQ ID NO: 23876 - protein, 218 aa, Artificial Sequence; identical to SEQ ID NO: 22266
  Description of Artificial Sequence: Synthetic polypeptide
  XENP020551 7G8_H0.99_L0_IgG1_PVA_/S267K Light Chain

SEQ ID NO: 23877 - protein, 111 aa, Artificial Sequence; identical to SEQ ID NO: 22267
  Description of Artificial Sequence: Synthetic polypeptide
  VL of XENP020551

SEQ ID NO: 23878 - protein, 15 aa, Artificial Sequence
  Description of Artificial Sequence: Synthetic peptide
  XENP020551 vlCDR1
KASQSVDYDGDSYMN

SEQ ID NO: 23879 - protein, 7 aa, Artificial Sequence
  Description of Artificial Sequence: Synthetic peptide
  XENP020551 vlCDR2
AASNLES

SEQ ID NO: 23880 - protein, 9 aa, Artificial Sequence
  Description of Artificial Sequence: Synthetic peptide
  XENP020551 vlCDR3
QQSNEDPFT

SEQ ID NO: 23881 - protein, 450 aa, Artificial Sequence
  Description of Artificial Sequence: Synthetic polypeptide
  XENP020552 7G8_H0.100_L0_IgG1_PVA_/S267K Heavy Chain
EVKLEESGGGLVQPGGSMKLSCAASGFTFSDAWMDWVRQSPEKGLEWVAEIRTKANNHATVYAESVKGRFTISRDDSKSSVYLQMNSLRAEDTGIYYCTRLANWDWYFDVWGAGTTVTVSSASTKGPSVFPLAPSSKSTSGGTAALGCLVKDYFPEPVTVSWNSGALTSGVHTFPAVLQSSGLYSLSSVVTVPSSSLGTQTYICNVNHKPSDTKVDKKVEPKSCDKTHTCPPCPAPPVAGPSVFLFPPKPKDTLMISRTPEVTCVVVDVKHEDPEVKFNWYVDGVEVHNAKTKPREEEYNSTYRVVSVLTVLHQDWLNGKEYKCKVSNKALPAPIEKTISKAKGQPREPQVYTLPPSREEMTKNQVSLTCDVSGFYPSDIAVEWESDGQPENNYKTTPPVLDSDGSFFLYSKLTVDKSRWEQGDVFSCSVMHEALHNHYTQKSLSLSPGK

SEQ ID NO: 23882 - protein, 121 aa, Artificial Sequence
  Description of Artificial Sequence: Synthetic polypeptide
  VH of XENP020552
EVKLEESGGGLVQPGGSMKLSCAASGFTFSDAWMDWVRQSPEKGLEWVAEIRTKANNHATVYAESVKGRFTISRDDSKSSVYLQMNSLRAEDTGIYYCTRLANWDWYFDVWGAGTTVTVSS

SEQ ID NO: 23883 - protein, 5 aa, Artificial Sequence
  Description of Artificial Sequence: Synthetic peptide
  XENP020552 vhCDR1
DAWMD

SEQ ID NO: 23884 - protein, 19 aa, Artificial Sequence
  Description of Artificial Sequence: Synthetic peptide
  XENP020552 vhCDR2
EIRTKANNHATVYAESVKG

SEQ ID NO: 23885 - protein, 10 aa, Artificial Sequence
  Description of Artificial Sequence: Synthetic peptide
  XENP020552 vhCDR3
LANWDWYFDV

SEQ ID NO: 23886 - protein, 218 aa, Artificial Sequence; identical to SEQ ID NO: 22266
  Description of Artificial Sequence: Synthetic polypeptide
  XENP020552 7G8_H0.100_L0_IgG1_PVA_/S267K Light Chain

SEQ ID NO: 23887 - protein, 111 aa, Artificial Sequence; identical to SEQ ID NO: 22267
  Description of Artificial Sequence: Synthetic polypeptide
  VL of XENP020552

SEQ ID NO: 23888 - protein, 15 aa, Artificial Sequence
  Description of Artificial Sequence: Synthetic peptide
  XENP020552 vlCDR1
KASQSVDYDGDSYMN

SEQ ID NO: 23889 - protein, 7 aa, Artificial Sequence
  Description of Artificial Sequence: Synthetic peptide
  XENP020552 vlCDR2
AASNLES

SEQ ID NO: 23890 - protein, 9 aa, Artificial Sequence
  Description of Artificial Sequence: Synthetic peptide
  XENP020552 vlCDR3
QQSNEDPFT

SEQ ID NO: 23891 - protein, 450 aa, Artificial Sequence
  Description of Artificial Sequence: Synthetic polypeptide
  XENP020553 7G8_H0.101_L0_IgG1_PVA_/S267K Heavy Chain
EVKLEESGGGLVQPGGSMKLSCAASGFTFSDAWMDWVRQSPEKGLEWVAEIRTKANNHATAYAESVKGRFTISRDDSKSSVYLQMNSLRAEDTGIYYCTRLANWDWYFDVWGAGTTVTVSSASTKGPSVFPLAPSSKSTSGGTAALGCLVKDYFPEPVTVSWNSGALTSGVHTFPAVLQSSGLYSLSSVVTVPSSSLGTQTYICNVNHKPSDTKVDKKVEPKSCDKTHTCPPCPAPPVAGPSVFLFPPKPKDTLMISRTPEVTCVVVDVKHEDPEVKFNWYVDGVEVHNAKTKPREEEYNSTYRVVSVLTVLHQDWLNGKEYKCKVSNKALPAPIEKTISKAKGQPREPQVYTLPPSREEMTKNQVSLTCDVSGFYPSDIAVEWESDGQPENNYKTTPPVLDSDGSFFLYSKLTVDKSRWEQGDVFSCSVMHEALHNHYTQKSLSLSPGK

SEQ ID NO: 23892 - protein, 121 aa, Artificial Sequence
  Description of Artificial Sequence: Synthetic polypeptide
  VH of XENP020553
EVKLEESGGGLVQPGGSMKLSCAASGFTFSDAWMDWVRQSPEKGLEWVAEIRTKANNHATAYAESVKGRFTISRDDSKSSVYLQMNSLRAEDTGIYYCTRLANWDWYFDVWGAGTTVTVSS

SEQ ID NO: 23893 - protein, 5 aa, Artificial Sequence
  Description of Artificial Sequence: Synthetic peptide
  XENP020553 vhCDR1
DAWMD

SEQ ID NO: 23894 - protein, 19 aa, Artificial Sequence
  Description of Artificial Sequence: Synthetic peptide
  XENP020553 vhCDR2
EIRTKANNHATAYAESVKG

SEQ ID NO: 23895 - protein, 10 aa, Artificial Sequence
  Description of Artificial Sequence: Synthetic peptide
  XENP020553 vhCDR3
LANWDWYFDV

SEQ ID NO: 23896 - protein, 218 aa, Artificial Sequence; identical to SEQ ID NO: 22266
  Description of Artificial Sequence: Synthetic polypeptide
  XENP020553 7G8_H0.101_L0_IgG1_PVA_/S267K Light Chain

SEQ ID NO: 23897 - protein, 111 aa, Artificial Sequence; identical to SEQ ID NO: 22267
  Description of Artificial Sequence: Synthetic polypeptide
  VL of XENP020553

SEQ ID NO: 23898 - protein, 15 aa, Artificial Sequence
  Description of Artificial Sequence: Synthetic peptide
  XENP020553 vlCDR1
KASQSVDYDGDSYMN

SEQ ID NO: 23899 - protein, 7 aa, Artificial Sequence
  Description of Artificial Sequence: Synthetic peptide
  XENP020553 vlCDR2
AASNLES

SEQ ID NO: 23900 - protein, 9 aa, Artificial Sequence
  Description of Artificial Sequence: Synthetic peptide
  XENP020553 vlCDR3
QQSNEDPFT

SEQ ID NO: 23901 - protein, 450 aa, Artificial Sequence
  Description of Artificial Sequence: Synthetic polypeptide
  XENP020554 7G8_H0.102_L0_IgG1_PVA_/S267K Heavy Chain
EVKLEESGGGLVQPGGSMKLSCAASGFTFSDAWMDWVRQSPEKGLEWVAEIRTKANNHATQYAESVKGRFTISRDDSKSSVYLQMNSLRAEDTGIYYCTRLANWDWYFDVWGAGTTVTVSSASTKGPSVFPLAPSSKSTSGGTAALGCLVKDYFPEPVTVSWNSGALTSGVHTFPAVLQSSGLYSLSSVVTVPSSSLGTQTYICNVNHKPSDTKVDKKVEPKSCDKTHTCPPCPAPPVAGPSVFLFPPKPKDTLMISRTPEVTCVVVDVKHEDPEVKFNWYVDGVEVHNAKTKPREEEYNSTYRVVSVLTVLHQDWLNGKEYKCKVSNKALPAPIEKTISKAKGQPREPQVYTLPPSREEMTKNQVSLTCDVSGFYPSDIAVEWESDGQPENNYKTTPPVLDSDGSFFLYSKLTVDKSRWEQGDVFSCSVMHEALHNHYTQKSLSLSPGK

SEQ ID NO: 23902 - protein, 121 aa, Artificial Sequence
  Description of Artificial Sequence: Synthetic polypeptide
  VH of XENP020554
EVKLEESGGGLVQPGGSMKLSCAASGFTFSDAWMDWVRQSPEKGLEWVAEIRTKANNHATQYAESVKGRFTISRDDSKSSVYLQMNSLRAEDTGIYYCTRLANWDWYFDVWGAGTTVTVSS

SEQ ID NO: 23903 - protein, 5 aa, Artificial Sequence
  Description of Artificial Sequence: Synthetic peptide
  XENP020554 vhCDR1
DAWMD

SEQ ID NO: 23904 - protein, 19 aa, Artificial Sequence
  Description of Artificial Sequence: Synthetic peptide
  XENP020554 vhCDR2
EIRTKANNHATQYAESVKG

SEQ ID NO: 23905 - protein, 10 aa, Artificial Sequence
  Description of Artificial Sequence: Synthetic peptide
  XENP020554 vhCDR3
LANWDWYFDV

SEQ ID NO: 23906 - protein, 218 aa, Artificial Sequence; identical to SEQ ID NO: 22266
  Description of Artificial Sequence: Synthetic polypeptide
  XENP020554 7G8_H0.102_L0_IgG1_PVA_/S267K Light Chain

SEQ ID NO: 23907 - protein, 111 aa, Artificial Sequence; identical to SEQ ID NO: 22267
  Description of Artificial Sequence: Synthetic polypeptide
  VL of XENP020554

SEQ ID NO: 23908 - protein, 15 aa, Artificial Sequence
  Description of Artificial Sequence: Synthetic peptide
  XENP020554 vlCDR1
KASQSVDYDGDSYMN

SEQ ID NO: 23909 - protein, 7 aa, Artificial Sequence
  Description of Artificial Sequence: Synthetic peptide
  XENP020554 vlCDR2
AASNLES

SEQ ID NO: 23910 - protein, 9 aa, Artificial Sequence
  Description of Artificial Sequence: Synthetic peptide
  XENP020554 vlCDR3
QQSNEDPFT

SEQ ID NO: 23911 - protein, 450 aa, Artificial Sequence
  Description of Artificial Sequence: Synthetic polypeptide
  XENP020555 7G8_H0.103_L0_IgG1_PVA_/S267K Heavy Chain
EVKLEESGGGLVQPGGSMKLSCAASGFTFSDAWMDWVRQSPEKGLEWVAEIRTKANNHATDYAESVKGRFTISRDDSKSSVYLQMNSLRAEDTGIYYCTRLANWDWYFDVWGAGTTVTVSSASTKGPSVFPLAPSSKSTSGGTAALGCLVKDYFPEPVTVSWNSGALTSGVHTFPAVLQSSGLYSLSSVVTVPSSSLGTQTYICNVNHKPSDTKVDKKVEPKSCDKTHTCPPCPAPPVAGPSVFLFPPKPKDTLMISRTPEVTCVVVDVKHEDPEVKFNWYVDGVEVHNAKTKPREEEYNSTYRVVSVLTVLHQDWLNGKEYKCKVSNKALPAPIEKTISKAKGQPREPQVYTLPPSREEMTKNQVSLTCDVSGFYPSDIAVEWESDGQPENNYKTTPPVLDSDGSFFLYSKLTVDKSRWEQGDVFSCSVMHEALHNHYTQKSLSLSPGK

SEQ ID NO: 23912 - protein, 121 aa, Artificial Sequence
  Description of Artificial Sequence: Synthetic polypeptide
  VH of XENP020555
EVKLEESGGGLVQPGGSMKLSCAASGFTFSDAWMDWVRQSPEKGLEWVAEIRTKANNHATDYAESVKGRFTISRDDSKSSVYLQMNSLRAEDTGIYYCTRLANWDWYFDVWGAGTTVTVSS

SEQ ID NO: 23913 - protein, 5 aa, Artificial Sequence
  Description of Artificial Sequence: Synthetic peptide
  XENP020555 vhCDR1
DAWMD

SEQ ID NO: 23914 - protein, 19 aa, Artificial Sequence
  Description of Artificial Sequence: Synthetic peptide
  XENP020555 vhCDR2
EIRTKANNHATDYAESVKG

SEQ ID NO: 23915 - protein, 10 aa, Artificial Sequence
  Description of Artificial Sequence: Synthetic peptide
  XENP020555 vhCDR3
LANWDWYFDV

SEQ ID NO: 23916 - protein, 218 aa, Artificial Sequence; identical to SEQ ID NO: 22266
  Description of Artificial Sequence: Synthetic polypeptide
  XENP020555 7G8_H0.103_L0_IgG1_PVA_/S267K Light Chain

SEQ ID NO: 23917 - protein, 111 aa, Artificial Sequence; identical to SEQ ID NO: 22267
  Description of Artificial Sequence: Synthetic polypeptide
  VL of XENP020555

SEQ ID NO: 23918 - protein, 15 aa, Artificial Sequence
  Description of Artificial Sequence: Synthetic peptide
  XENP020555 vlCDR1
KASQSVDYDGDSYMN

SEQ ID NO: 23919 - protein, 7 aa, Artificial Sequence
  Description of Artificial Sequence: Synthetic peptide
  XENP020555 vlCDR2
AASNLES

SEQ ID NO: 23920 - protein, 9 aa, Artificial Sequence
  Description of Artificial Sequence: Synthetic peptide
  XENP020555 vlCDR3
QQSNEDPFT

SEQ ID NO: 23921 - protein, 450 aa, Artificial Sequence
  Description of Artificial Sequence: Synthetic polypeptide
  XENP020556 7G8_H0.104_L0_IgG1_PVA_/S267K Heavy Chain
EVKLEESGGGLVQPGGSMKLSCAASGFTFSDAWMDWVRQSPEKGLEWVAEIRTKANNHATKYAESVKGRFTISRDDSKSSVYLQMNSLRAEDTGIYYCTRLANWDWYFDVWGAGTTVTVSSASTKGPSVFPLAPSSKSTSGGTAALGCLVKDYFPEPVTVSWNSGALTSGVHTFPAVLQSSGLYSLSSVVTVPSSSLGTQTYICNVNHKPSDTKVDKKVEPKSCDKTHTCPPCPAPPVAGPSVFLFPPKPKDTLMISRTPEVTCVVVDVKHEDPEVKFNWYVDGVEVHNAKTKPREEEYNSTYRVVSVLTVLHQDWLNGKEYKCKVSNKALPAPIEKTISKAKGQPREPQVYTLPPSREEMTKNQVSLTCDVSGFYPSDIAVEWESDGQPENNYKTTPPVLDSDGSFFLYSKLTVDKSRWEQGDVFSCSVMHEALHNHYTQKSLSLSPGK

SEQ ID NO: 23922 - protein, 121 aa, Artificial Sequence
  Description of Artificial Sequence: Synthetic polypeptide
  VH of XENP020556
EVKLEESGGGLVQPGGSMKLSCAASGFTFSDAWMDWVRQSPEKGLEWVAEIRTKANNHATKYAESVKGRFTISRDDSKSSVYLQMNSLRAEDTGIYYCTRLANWDWYFDVWGAGTTVTVSS

SEQ ID NO: 23923 - protein, 5 aa, Artificial Sequence
  Description of Artificial Sequence: Synthetic peptide
  XENP020556 vhCDR1
DAWMD

SEQ ID NO: 23924 - protein, 19 aa, Artificial Sequence
  Description of Artificial Sequence: Synthetic peptide
  XENP020556 vhCDR2
EIRTKANNHATKYAESVKG

SEQ ID NO: 23925 - protein, 10 aa, Artificial Sequence
  Description of Artificial Sequence: Synthetic peptide
  XENP020556 vhCDR3
LANWDWYFDV

SEQ ID NO: 23926 - protein, 218 aa, Artificial Sequence; identical to SEQ ID NO: 22266
  Description of Artificial Sequence: Synthetic polypeptide
  XENP020556 7G8_H0.104_L0_IgG1_PVA_/S267K Light Chain

SEQ ID NO: 23927 - protein, 111 aa, Artificial Sequence; identical to SEQ ID NO: 22267
  Description of Artificial Sequence: Synthetic polypeptide
  VL of XENP020556

SEQ ID NO: 23928 - protein, 15 aa, Artificial Sequence
  Description of Artificial Sequence: Synthetic peptide
  XENP020556 vlCDR1
KASQSVDYDGDSYMN

SEQ ID NO: 23929 - protein, 7 aa, Artificial Sequence
  Description of Artificial Sequence: Synthetic peptide
  XENP020556 vlCDR2
AASNLES

SEQ ID NO: 23930 - protein, 9 aa, Artificial Sequence
  Description of Artificial Sequence: Synthetic peptide
  XENP020556 vlCDR3
QQSNEDPFT

SEQ ID NO: 23931 - protein, 450 aa, Artificial Sequence
  Description of Artificial Sequence: Synthetic polypeptide
  XENP020557 7G8_H0.105_L0_IgG1_PVA_/S267K Heavy Chain
EVKLEESGGGLVQPGGSMKLSCAASGFTFSDAWMDWVRQSPEKGLEWVAEIRTKANNHATYYAESVKGRFTISRDDSKSSVYLQMNSLRAEDTGIYYCTRIANWDWYFDVWGAGTTVTVSSASTKGPSVFPLAPSSKSTSGGTAALGCLVKDYFPEPVTVSWNSGALTSGVHTFPAVLQSSGLYSLSSVVTVPSSSLGTQTYICNVNHKPSDTKVDKKVEPKSCDKTHTCPPCPAPPVAGPSVFLFPPKPKDTLMISRTPEVTCVVVDVKHEDPEVKFNWYVDGVEVHNAKTKPREEEYNSTYRVVSVLTVLHQDWLNGKEYKCKVSNKALPAPIEKTISKAKGQPREPQVYTLPPSREEMTKNQVSLTCDVSGFYPSDIAVEWESDGQPENNYKTTPPVLDSDGSFFLYSKLTVDKSRWEQGDVFSCSVMHEALHNHYTQKSLSLSPGK

SEQ ID NO: 23932 - protein, 121 aa, Artificial Sequence
  Description of Artificial Sequence: Synthetic polypeptide
  VH of XENP020557
EVKLEESGGGLVQPGGSMKLSCAASGFTFSDAWMDWVRQSPEKGLEWVAEIRTKANNHATYYAESVKGRFTISRDDSKSSVYLQMNSLRAEDTGIYYCTRIANWDWYFDVWGAGTTVTVSS

SEQ ID NO: 23933 - protein, 5 aa, Artificial Sequence
  Description of Artificial Sequence: Synthetic peptide
  XENP020557 vhCDR1
DAWMD

SEQ ID NO: 23934 - protein, 19 aa, Artificial Sequence
  Description of Artificial Sequence: Synthetic peptide
  XENP020557 vhCDR2
EIRTKANNHATYYAESVKG

SEQ ID NO: 23935 - protein, 10 aa, Artificial Sequence
  Description of Artificial Sequence: Synthetic peptide
  XENP020557 vhCDR3
IANWDWYFDV

SEQ ID NO: 23936 - protein, 218 aa, Artificial Sequence; identical to SEQ ID NO: 22266
  Description of Artificial Sequence: Synthetic polypeptide
  XENP020557 7G8_H0.105_L0_IgG1_PVA_/S267K Light Chain

SEQ ID NO: 23937 - protein, 111 aa, Artificial Sequence; identical to SEQ ID NO: 22267
  Description of Artificial Sequence: Synthetic polypeptide
  VL of XENP020557

SEQ ID NO: 23938 - protein, 15 aa, Artificial Sequence
  Description of Artificial Sequence: Synthetic peptide
  XENP020557 vlCDR1
KASQSVDYDGDSYMN

SEQ ID NO: 23939 - protein, 7 aa, Artificial Sequence
  Description of Artificial Sequence: Synthetic peptide
  XENP020557 vlCDR2
AASNLES

SEQ ID NO: 23940 - protein, 9 aa, Artificial Sequence
  Description of Artificial Sequence: Synthetic peptide
  XENP020557 vlCDR3
QQSNEDPFT

SEQ ID NO: 23941 - protein, 450 aa, Artificial Sequence
  Description of Artificial Sequence: Synthetic polypeptide
  XENP020558 7G8_H0.106_L0_IgG1_PVA_/S267K Heavy Chain
EVKLEESGGGLVQPGGSMKLSCAASGFTFSDAWMDWVRQSPEKGLEWVAEIRTKANNHATYYAESVKGRFTISRDDSKSSVYLQMNSLRAEDTGIYYCTRFANWDWYFDVWGAGTTVTVSSASTKGPSVFPLAPSSKSTSGGTAALGCLVKDYFPEPVTVSWNSGALTSGVHTFPAVLQSSGLYSLSSVVTVPSSSLGTQTYICNVNHKPSDTKVDKKVEPKSCDKTHTCPPCPAPPVAGPSVFLFPPKPKDTLMISRTPEVTCVVVDVKHEDPEVKFNWYVDGVEVHNAKTKPREEEYNSTYRVVSVLTVLHQDWLNGKEYKCKVSNKALPAPIEKTISKAKGQPREPQVYTLPPSREEMTKNQVSLTCDVSGFYPSDIAVEWESDGQPENNYKTTPPVLDSDGSFFLYSKLTVDKSRWEQGDVFSCSVMHEALHNHYTQKSLSLSPGK

SEQ ID NO: 23942 - protein, 121 aa, Artificial Sequence
  Description of Artificial Sequence: Synthetic polypeptide
  VH of XENP020558
EVKLEESGGGLVQPGGSMKLSCAASGFTFSDAWMDWVRQSPEKGLEWVAEIRTKANNHATYYAESVKGRFTISRDDSKSSVYLQMNSLRAEDTGIYYCTRFANWDWYFDVWGAGTTVTVSS

SEQ ID NO: 23943 - protein, 5 aa, Artificial Sequence
  Description of Artificial Sequence: Synthetic peptide
  XENP020558 vhCDR1
DAWMD

SEQ ID NO: 23944 - protein, 19 aa, Artificial Sequence
  Description of Artificial Sequence: Synthetic peptide
  XENP020558 vhCDR2
EIRTKANNHATYYAESVKG

SEQ ID NO: 23945 - protein, 10 aa, Artificial Sequence
  Description of Artificial Sequence: Synthetic peptide
  XENP020558 vhCDR3
FANWDWYFDV

SEQ ID NO: 23946 - protein, 218 aa, Artificial Sequence; identical to SEQ ID NO: 22266
  Description of Artificial Sequence: Synthetic polypeptide
  XENP020558 7G8_H0.106_L0_IgG1_PVA_/S267K Light Chain

SEQ ID NO: 23947 - protein, 111 aa, Artificial Sequence; identical to SEQ ID NO: 22267
  Description of Artificial Sequence: Synthetic polypeptide
  VL of XENP020558

SEQ ID NO: 23948 - protein, 15 aa, Artificial Sequence
  Description of Artificial Sequence: Synthetic peptide
  XENP020558 vlCDR1
KASQSVDYDGDSYMN

SEQ ID NO: 23949 - protein, 7 aa, Artificial Sequence
  Description of Artificial Sequence: Synthetic peptide
  XENP020558 vlCDR2
AASNLES

SEQ ID NO: 23950 - protein, 9 aa, Artificial Sequence
  Description of Artificial Sequence: Synthetic peptide
  XENP020558 vlCDR3
QQSNEDPFT

SEQ ID NO: 23951 - protein, 450 aa, Artificial Sequence
  Description of Artificial Sequence: Synthetic polypeptide
  XENP020559 7G8_H0.107_L0_IgG1_PVA_/S267K Heavy Chain
EVKLEESGGGLVQPGGSMKLSCAASGFTFSDAWMDWVRQSPEKGLEWVAEIRTKANNHATYYAESVKGRFTISRDDSKSSVYLQMNSLRAEDTGIYYCTRVANWDWYFDVWGAGTTVTVSSASTKGPSVFPLAPSSKSTSGGTAALGCLVKDYFPEPVTVSWNSGALTSGVHTFPAVLQSSGLYSLSSVVTVPSSSLGTQTYICNVNHKPSDTKVDKKVEPKSCDKTHTCPPCPAPPVAGPSVFLFPPKPKDTLMISRTPEVTCVVVDVKHEDPEVKFNWYVDGVEVHNAKTKPREEEYNSTYRVVSVLTVLHQDWLNGKEYKCKVSNKALPAPIEKTISKAKGQPREPQVYTLPPSREEMTKNQVSLTCDVSGFYPSDIAVEWESDGQPENNYKTTPPVLDSDGSFFLYSKLTVDKSRWEQGDVFSCSVMHEALHNHYTQKSLSLSPGK

SEQ ID NO: 23952 - protein, 121 aa, Artificial Sequence
  Description of Artificial Sequence: Synthetic polypeptide
  VH of XENP020559
EVKLEESGGGLVQPGGSMKLSCAASGFTFSDAWMDWVRQSPEKGLEWVAEIRTKANNHATYYAESVKGRFTISRDDSKSSVYLQMNSLRAEDTGIYYCTRVANWDWYFDVWGAGTTVTVSS

SEQ ID NO: 23953 - protein, 5 aa, Artificial Sequence
  Description of Artificial Sequence: Synthetic peptide
  XENP020559 vhCDR1
DAWMD

SEQ ID NO: 23954 - protein, 19 aa, Artificial Sequence
  Description of Artificial Sequence: Synthetic peptide
  XENP020559 vhCDR2
EIRTKANNHATYYAESVKG

SEQ ID NO: 23955 - protein, 10 aa, Artificial Sequence
  Description of Artificial Sequence: Synthetic peptide
  XENP020559 vhCDR3
VANWDWYFDV

SEQ ID NO: 23956 - protein, 218 aa, Artificial Sequence; identical to SEQ ID NO: 22266
  Description of Artificial Sequence: Synthetic polypeptide
  XENP020559 7G8_H0.107_L0_IgG1_PVA_/S267K Light Chain

SEQ ID NO: 23957 - protein, 111 aa, Artificial Sequence; identical to SEQ ID NO: 22267
  Description of Artificial Sequence: Synthetic polypeptide
  VL of XENP020559

SEQ ID NO: 23958 - protein, 15 aa, Artificial Sequence
  Description of Artificial Sequence: Synthetic peptide
  XENP020559 vlCDR1
KASQSVDYDGDSYMN

SEQ ID NO: 23959 - protein, 7 aa, Artificial Sequence
  Description of Artificial Sequence: Synthetic peptide
  XENP020559 vlCDR2
AASNLES

SEQ ID NO: 23960 - protein, 9 aa, Artificial Sequence
  Description of Artificial Sequence: Synthetic peptide
  XENP020559 vlCDR3
QQSNEDPFT

SEQ ID NO: 23961 - protein, 450 aa, Artificial Sequence
  Description of Artificial Sequence: Synthetic polypeptide
  XENP020560 7G8_H0.108_L0_IgG1_PVA_/S267K Heavy Chain
EVKLEESGGGLVQPGGSMKLSCAASGFTFSDAWMDWVRQSPEKGLEWVAEIRTKANNHATYYAESVKGRFTISRDDSKSSVYLQMNSLRAEDTGIYYCTRYANWDWYFDVWGAGTTVTVSSASTKGPSVFPLAPSSKSTSGGTAALGCLVKDYFPEPVTVSWNSGALTSGVHTFPAVLQSSGLYSLSSVVTVPSSSLGTQTYICNVNHKPSDTKVDKKVEPKSCDKTHTCPPCPAPPVAGPSVFLFPPKPKDTLMISRTPEVTCVVVDVKHEDPEVKFNWYVDGVEVHNAKTKPREEEYNSTYRVVSVLTVLHQDWLNGKEYKCKVSNKALPAPIEKTISKAKGQPREPQVYTLPPSREEMTKNQVSLTCDVSGFYPSDIAVEWESDGQPENNYKTTPPVLDSDGSFFLYSKLTVDKSRWEQGDVFSCSVMHEALHNHYTQKSLSLSPGK

SEQ ID NO: 23962 - protein, 121 aa, Artificial Sequence
  Description of Artificial Sequence: Synthetic polypeptide
  VH of XENP020560
EVKLEESGGGLVQPGGSMKLSCAASGFTFSDAWMDWVRQSPEKGLEWVAEIRTKANNHATYYAESVKGRFTISRDDSKSSVYLQMNSLRAEDTGIYYCTRYANWDWYFDVWGAGTTVTVSS

SEQ ID NO: 23963 - protein, 5 aa, Artificial Sequence
  Description of Artificial Sequence: Synthetic peptide
  XENP020560 vhCDR1
DAWMD

SEQ ID NO: 23964 - protein, 19 aa, Artificial Sequence
  Description of Artificial Sequence: Synthetic peptide
  XENP020560 vhCDR2
EIRTKANNHATYYAESVKG

SEQ ID NO: 23965 - protein, 10 aa, Artificial Sequence
  Description of Artificial Sequence: Synthetic peptide
  XENP020560 vhCDR3
YANWDWYFDV

SEQ ID NO: 23966 - protein, 218 aa, Artificial Sequence; identical to SEQ ID NO: 22266
  Description of Artificial Sequence: Synthetic polypeptide
  XENP020560 7G8_H0.108_L0_IgG1_PVA_/S267K Light Chain

SEQ ID NO: 23967 - protein, 111 aa, Artificial Sequence; identical to SEQ ID NO: 22267
  Description of Artificial Sequence: Synthetic polypeptide
  VL of XENP020560

SEQ ID NO: 23968 - protein, 15 aa, Artificial Sequence
  Description of Artificial Sequence: Synthetic peptide
  XENP020560 vlCDR1
KASQSVDYDGDSYMN

SEQ ID NO: 23969 - protein, 7 aa, Artificial Sequence
  Description of Artificial Sequence: Synthetic peptide
  XENP020560 vlCDR2
AASNLES

SEQ ID NO: 23970 - protein, 9 aa, Artificial Sequence
  Description of Artificial Sequence: Synthetic peptide
  XENP020560 vlCDR3
QQSNEDPFT

SEQ ID NO: 23971 - protein, 450 aa, Artificial Sequence
  Description of Artificial Sequence: Synthetic polypeptide
  XENP020561 7G8_H0.109_L0_IgG1_PVA_/S267K Heavy Chain
EVKLEESGGGLVQPGGSMKLSCAASGFTFSDAWMDWVRQSPEKGLEWVAEIRTKANNHATYYAESVKGRFTISRDDSKSSVYLQMNSLRAEDTGIYYCTRWANWDWYFDVWGAGTTVTVSSASTKGPSVFPLAPSSKSTSGGTAALGCLVKDYFPEPVTVSWNSGALTSGVHTFPAVLQSSGLYSLSSVVTVPSSSLGTQTYICNVNHKPSDTKVDKKVEPKSCDKTHTCPPCPAPPVAGPSVFLFPPKPKDTLMISRTPEVTCVVVDVKHEDPEVKFNWYVDGVEVHNAKTKPREEEYNSTYRVVSVLTVLHQDWLNGKEYKCKVSNKALPAPIEKTISKAKGQPREPQVYTLPPSREEMTKNQVSLTCDVSGFYPSDIAVEWESDGQPENNYKTTPPVLDSDGSFFLYSKLTVDKSRWEQGDVFSCSVMHEALHNHYTQKSLSLSPGK

SEQ ID NO: 23972 - protein, 121 aa, Artificial Sequence
  Description of Artificial Sequence: Synthetic polypeptide
  VH of XENP020561
EVKLEESGGGLVQPGGSMKLSCAASGFTFSDAWMDWVRQSPEKGLEWVAEIRTKANNHATYYAESVKGRFTISRDDSKSSVYLQMNSLRAEDTGIYYCTRWANWDWYFDVWGAGTTVTVSS

SEQ ID NO: 23973 - protein, 5 aa, Artificial Sequence
  Description of Artificial Sequence: Synthetic peptide
  XENP020561 vhCDR1
DAWMD

SEQ ID NO: 23974 - protein, 19 aa, Artificial Sequence
  Description of Artificial Sequence: Synthetic peptide
  XENP020561 vhCDR2
EIRTKANNHATYYAESVKG

SEQ ID NO: 23975 - protein, 10 aa, Artificial Sequence
  Description of Artificial Sequence: Synthetic peptide
  XENP020561 vhCDR3
WANWDWYFDV

SEQ ID NO: 23976 - protein, 218 aa, Artificial Sequence; identical to SEQ ID NO: 22266
  Description of Artificial Sequence: Synthetic polypeptide
  XENP020561 7G8_H0.109_L0_IgG1_PVA_/S267K Light Chain

SEQ ID NO: 23977 - protein, 111 aa, Artificial Sequence; identical to SEQ ID NO: 22267
  Description of Artificial Sequence: Synthetic polypeptide
  VL of XENP020561

SEQ ID NO: 23978 - protein, 15 aa, Artificial Sequence
  Description of Artificial Sequence: Synthetic peptide
  XENP020561 vlCDR1
KASQSVDYDGDSYMN

SEQ ID NO: 23979 - protein, 7 aa, Artificial Sequence
  Description of Artificial Sequence: Synthetic peptide
  XENP020561 vlCDR2
AASNLES

SEQ ID NO: 23980 - protein, 9 aa, Artificial Sequence
  Description of Artificial Sequence: Synthetic peptide
  XENP020561 vlCDR3
QQSNEDPFT

SEQ ID NO: 23981 - protein, 450 aa, Artificial Sequence
  Description of Artificial Sequence: Synthetic polypeptide
  XENP020562 7G8_H0.110_L0_IgG1_PVA_/S267K Heavy Chain
EVKLEESGGGLVQPGGSMKLSCAASGFTFSDAWMDWVRQSPEKGLEWVAEIRTKANNHATYYAESVKGRFTISRDDSKSSVYLQMNSLRAEDTGIYYCTRDANWDWYFDVWGAGTTVTVSSASTKGPSVFPLAPSSKSTSGGTAALGCLVKDYFPEPVTVSWNSGALTSGVHTFPAVLQSSGLYSLSSVVTVPSSSLGTQTYICNVNHKPSDTKVDKKVEPKSCDKTHTCPPCPAPPVAGPSVFLFPPKPKDTLMISRTPEVTCVVVDVKHEDPEVKFNWYVDGVEVHNAKTKPREEEYNSTYRVVSVLTVLHQDWLNGKEYKCKVSNKALPAPIEKTISKAKGQPREPQVYTLPPSREEMTKNQVSLTCDVSGFYPSDIAVEWESDGQPENNYKTTPPVLDSDGSFFLYSKLTVDKSRWEQGDVFSCSVMHEALHNHYTQKSLSLSPGK

SEQ ID NO: 23982 - protein, 121 aa, Artificial Sequence
  Description of Artificial Sequence: Synthetic polypeptide
  VH of XENP020562
EVKLEESGGGLVQPGGSMKLSCAASGFTFSDAWMDWVRQSPEKGLEWVAEIRTKANNHATYYAESVKGRFTISRDDSKSSVYLQMNSLRAEDTGIYYCTRDANWDWYFDVWGAGTTVTVSS

SEQ ID NO: 23983 - protein, 5 aa, Artificial Sequence
  Description of Artificial Sequence: Synthetic peptide
  XENP020562 vhCDR1
DAWMD

SEQ ID NO: 23984 - protein, 19 aa, Artificial Sequence
  Description of Artificial Sequence: Synthetic peptide
  XENP020562 vhCDR2
EIRTKANNHATYYAESVKG

SEQ ID NO: 23985 - protein, 10 aa, Artificial Sequence
  Description of Artificial Sequence: Synthetic peptide
  XENP020562 vhCDR3
DANWDWYFDV

SEQ ID NO: 23986 - protein, 218 aa, Artificial Sequence; identical to SEQ ID NO: 22266
  Description of Artificial Sequence: Synthetic polypeptide
  XENP020562 7G8_H0.110_L0_IgG1_PVA_/S267K Light Chain

SEQ ID NO: 23987 - protein, 111 aa, Artificial Sequence; identical to SEQ ID NO: 22267
  Description of Artificial Sequence: Synthetic polypeptide
  VL of XENP020562

SEQ ID NO: 23988 - protein, 15 aa, Artificial Sequence
  Description of Artificial Sequence: Synthetic peptide
  XENP020562 vlCDR1
KASQSVDYDGDSYMN

SEQ ID NO: 23989 - protein, 7 aa, Artificial Sequence
  Description of Artificial Sequence: Synthetic peptide
  XENP020562 vlCDR2
AASNLES

SEQ ID NO: 23990 - protein, 9 aa, Artificial Sequence
  Description of Artificial Sequence: Synthetic peptide
  XENP020562 vlCDR3
QQSNEDPFT

SEQ ID NO: 23991 - protein, 450 aa, Artificial Sequence
  Description of Artificial Sequence: Synthetic polypeptide
  XENP020563 7G8_H0.111_L0_IgG1_PVA_/S267K Heavy Chain
EVKLEESGGGLVQPGGSMKLSCAASGFTFSDAWMDWVRQSPEKGLEWVAEIRTKANNHATYYAESVKGRFTISRDDSKSSVYLQMNSLRAEDTGIYYCTRAANWDWYFDVWGAGTTVTVSSASTKGPSVFPLAPSSKSTSGGTAALGCLVKDYFPEPVTVSWNSGALTSGVHTFPAVLQSSGLYSLSSVVTVPSSSLGTQTYICNVNHKPSDTKVDKKVEPKSCDKTHTCPPCPAPPVAGPSVFLFPPKPKDTLMISRTPEVTCVVVDVKHEDPEVKFNWYVDGVEVHNAKTKPREEEYNSTYRVVSVLTVLHQDWLNGKEYKCKVSNKALPAPIEKTISKAKGQPREPQVYTLPPSREEMTKNQVSLTCDVSGFYPSDIAVEWESDGQPENNYKTTPPVLDSDGSFFLYSKLTVDKSRWEQGDVFSCSVMHEALHNHYTQKSLSLSPGK

SEQ ID NO: 23992 - protein, 121 aa, Artificial Sequence
  Description of Artificial Sequence: Synthetic polypeptide
  VH of XENP020563
EVKLEESGGGLVQPGGSMKLSCAASGFTFSDAWMDWVRQSPEKGLEWVAEIRTKANNHATYYAESVKGRFTISRDDSKSSVYLQMNSLRAEDTGIYYCTRAANWDWYFDVWGAGTTVTVSS

SEQ ID NO: 23993 - protein, 5 aa, Artificial Sequence
  Description of Artificial Sequence: Synthetic peptide
  XENP020563 vhCDR1
DAWMD

SEQ ID NO: 23994 - protein, 19 aa, Artificial Sequence
  Description of Artificial Sequence: Synthetic peptide
  XENP020563 vhCDR2
EIRTKANNHATYYAESVKG

SEQ ID NO: 23995 - protein, 10 aa, Artificial Sequence
  Description of Artificial Sequence: Synthetic peptide
  XENP020563 vhCDR3
AANWDWYFDV

SEQ ID NO: 23996 - protein, 218 aa, Artificial Sequence; identical to SEQ ID NO: 22266
  Description of Artificial Sequence: Synthetic polypeptide
  XENP020563 7G8_H0.111_L0_IgG1_PVA_/S267K Light Chain

SEQ ID NO: 23997 - protein, 111 aa, Artificial Sequence; identical to SEQ ID NO: 22267
  Description of Artificial Sequence: Synthetic polypeptide
  VL of XENP020563

SEQ ID NO: 23998 - protein, 15 aa, Artificial Sequence
  Description of Artificial Sequence: Synthetic peptide
  XENP020563 vlCDR1
KASQSVDYDGDSYMN

SEQ ID NO: 23999 - protein, 7 aa, Artificial Sequence
  Description of Artificial Sequence: Synthetic peptide
  XENP020563 vlCDR2
AASNLES

SEQ ID NO: 24000 - protein, 9 aa, Artificial Sequence
  Description of Artificial Sequence: Synthetic peptide
  XENP020563 vlCDR3
QQSNEDPFT

SEQ ID NO: 24001 - protein, 450 aa, Artificial Sequence
  Description of Artificial Sequence: Synthetic polypeptide
  XENP020564 7G8_H0.112_L0_IgG1_PVA_/S267K Heavy Chain
EVKLEESGGGLVQPGGSMKLSCAASGFTFSDAWMDWVRQSPEKGLEWVAEIRTKANNHATYYAESVKGRFTISRDDSKSSVYLQMNSLRAEDTGIYYCTRQANWDWYFDVWGAGTTVTVSSASTKGPSVFPLAPSSKSTSGGTAALGCLVKDYFPEPVTVSWNSGALTSGVHTFPAVLQSSGLYSLSSVVTVPSSSLGTQTYICNVNHKPSDTKVDKKVEPKSCDKTHTCPPCPAPPVAGPSVFLFPPKPKDTLMISRTPEVTCVVVDVKHEDPEVKFNWYVDGVEVHNAKTKPREEEYNSTYRVVSVLTVLHQDWLNGKEYKCKVSNKALPAPIEKTISKAKGQPREPQVYTLPPSREEMTKNQVSLTCDVSGFYPSDIAVEWESDGQPENNYKTTPPVLDSDGSFFLYSKLTVDKSRWEQGDVFSCSVMHEALHNHYTQKSLSLSPGK

SEQ ID NO: 24002 - protein, 121 aa, Artificial Sequence
  Description of Artificial Sequence: Synthetic polypeptide
  VH of XENP020564
EVKLEESGGGLVQPGGSMKLSCAASGFTFSDAWMDWVRQSPEKGLEWVAEIRTKANNHATYYAESVKGRFTISRDDSKSSVYLQMNSLRAEDTGIYYCTRQANWDWYFDVWGAGTTVTVSS

SEQ ID NO: 24003 - protein, 5 aa, Artificial Sequence
  Description of Artificial Sequence: Synthetic peptide
  XENP020564 vhCDR1
DAWMD

SEQ ID NO: 24004 - protein, 19 aa, Artificial Sequence
  Description of Artificial Sequence: Synthetic peptide
  XENP020564 vhCDR2
EIRTKANNHATYYAESVKG

SEQ ID NO: 24005 - protein, 10 aa, Artificial Sequence
  Description of Artificial Sequence: Synthetic peptide
  XENP020564 vhCDR3
QANWDWYFDV

SEQ ID NO: 24006 - protein, 218 aa, Artificial Sequence; identical to SEQ ID NO: 22266
  Description of Artificial Sequence: Synthetic polypeptide
  XENP020564 7G8_H0.112_L0_IgG1_PVA_/S267K Light Chain

SEQ ID NO: 24007 - protein, 111 aa, Artificial Sequence; identical to SEQ ID NO: 22267
  Description of Artificial Sequence: Synthetic polypeptide
  VL of XENP020564

SEQ ID NO: 24008 - protein, 15 aa, Artificial Sequence
  Description of Artificial Sequence: Synthetic peptide
  XENP020564 vlCDR1
KASQSVDYDGDSYMN

SEQ ID NO: 24009 - protein, 7 aa, Artificial Sequence
  Description of Artificial Sequence: Synthetic peptide
  XENP020564 vlCDR2
AASNLES

SEQ ID NO: 24010 - protein, 9 aa, Artificial Sequence
  Description of Artificial Sequence: Synthetic peptide
  XENP020564 vlCDR3
QQSNEDPFT

SEQ ID NO: 24011 - protein, 450 aa, Artificial Sequence
  Description of Artificial Sequence: Synthetic polypeptide
  XENP020565 7G8_H0.113_L0_IgG1_PVA_/S267K Heavy Chain
EVKLEESGGGLVQPGGSMKLSCAASGFTFSDAWMDWVRQSPEKGLEWVAEIRTKANNHATYYAESVKGRFTISRDDSKSSVYLQMNSLRAEDTGIYYCTRKANWDWYFDVWGAGTTVTVSSASTKGPSVFPLAPSSKSTSGGTAALGCLVKDYFPEPVTVSWNSGALTSGVHTFPAVLQSSGLYSLSSVVTVPSSSLGTQTYICNVNHKPSDTKVDKKVEPKSCDKTHTCPPCPAPPVAGPSVFLFPPKPKDTLMISRTPEVTCVVVDVKHEDPEVKFNWYVDGVEVHNAKTKPREEEYNSTYRVVSVLTVLHQDWLNGKEYKCKVSNKALPAPIEKTISKAKGQPREPQVYTLPPSREEMTKNQVSLTCDVSGFYPSDIAVEWESDGQPENNYKTTPPVLDSDGSFFLYSKLTVDKSRWEQGDVFSCSVMHEALHNHYTQKSLSLSPGK

SEQ ID NO: 24012 - protein, 121 aa, Artificial Sequence
  Description of Artificial Sequence: Synthetic polypeptide
  VH of XENP020565
EVKLEESGGGLVQPGGSMKLSCAASGFTFSDAWMDWVRQSPEKGLEWVAEIRTKANNHATYYAESVKGRFTISRDDSKSSVYLQMNSLRAEDTGIYYCTRKANWDWYFDVWGAGTTVTVSS

SEQ ID NO: 24013 - protein, 5 aa, Artificial Sequence
  Description of Artificial Sequence: Synthetic peptide
  XENP020565 vhCDR1
DAWMD

SEQ ID NO: 24014 - protein, 19 aa, Artificial Sequence
  Description of Artificial Sequence: Synthetic peptide
  XENP020565 vhCDR2
EIRTKANNHATYYAESVKG

SEQ ID NO: 24015 - protein, 10 aa, Artificial Sequence
  Description of Artificial Sequence: Synthetic peptide
  XENP020565 vhCDR3
KANWDWYFDV

SEQ ID NO: 24016 - protein, 218 aa, Artificial Sequence; identical to SEQ ID NO: 22266
  Description of Artificial Sequence: Synthetic polypeptide
  XENP020565 7G8_H0.113_L0_IgG1_PVA_/S267K Light Chain

SEQ ID NO: 24017 - protein, 111 aa, Artificial Sequence; identical to SEQ ID NO: 22267
  Description of Artificial Sequence: Synthetic polypeptide
  VL of XENP020565

SEQ ID NO: 24018 - protein, 15 aa, Artificial Sequence
  Description of Artificial Sequence: Synthetic peptide
  XENP020565 vlCDR1
KASQSVDYDGDSYMN

SEQ ID NO: 24019 - protein, 7 aa, Artificial Sequence
  Description of Artificial Sequence: Synthetic peptide
  XENP020565 vlCDR2
AASNLES

SEQ ID NO: 24020 - protein, 9 aa, Artificial Sequence
  Description of Artificial Sequence: Synthetic peptide
  XENP020565 vlCDR3
QQSNEDPFT

SEQ ID NO: 24021 - protein, 450 aa, Artificial Sequence
  Description of Artificial Sequence: Synthetic polypeptide
  XENP020566 7G8_H0.114_L0_IgG1_PVA_/S267K Heavy Chain
EVKLEESGGGLVQPGGSMKLSCAASGFTFSDAWMDWVRQSPEKGLEWVAEIRTKANNHATYYAESVKGRFTISRDDSKSSVYLQMNSLRAEDTGIYYCTRLSNWDWYFDVWGAGTTVTVSSASTKGPSVFPLAPSSKSTSGGTAALGCLVKDYFPEPVTVSWNSGALTSGVHTFPAVLQSSGLYSLSSVVTVPSSSLGTQTYICNVNHKPSDTKVDKKVEPKSCDKTHTCPPCPAPPVAGPSVFLFPPKPKDTLMISRTPEVTCVVVDVKHEDPEVKFNWYVDGVEVHNAKTKPREEEYNSTYRVVSVLTVLHQDWLNGKEYKCKVSNKALPAPIEKTISKAKGQPREPQVYTLPPSREEMTKNQVSLTCDVSGFYPSDIAVEWESDGQPENNYKTTPPVLDSDGSFFLYSKLTVDKSRWEQGDVFSCSVMHEALHNHYTQKSLSLSPGK

SEQ ID NO: 24022 - protein, 121 aa, Artificial Sequence
  Description of Artificial Sequence: Synthetic polypeptide
  VH of XENP020566
EVKLEESGGGLVQPGGSMKLSCAASGFTFSDAWMDWVRQSPEKGLEWVAEIRTKANNHATYYAESVKGRFTISRDDSKSSVYLQMNSLRAEDTGIYYCTRLSNWDWYFDVWGAGTTVTVSS

SEQ ID NO: 24023 - protein, 5 aa, Artificial Sequence
  Description of Artificial Sequence: Synthetic peptide
  XENP020566 vhCDR1
DAWMD

SEQ ID NO: 24024 - protein, 19 aa, Artificial Sequence
  Description of Artificial Sequence: Synthetic peptide
  XENP020566 vhCDR2
EIRTKANNHATYYAESVKG

SEQ ID NO: 24025 - protein, 10 aa, Artificial Sequence
  Description of Artificial Sequence: Synthetic peptide
  XENP020566 vhCDR3
LSNWDWYFDV

SEQ ID NO: 24026 - protein, 218 aa, Artificial Sequence; identical to SEQ ID NO: 22266
  Description of Artificial Sequence: Synthetic polypeptide
  XENP020566 7G8_H0.114_L0_IgG1_PVA_/S267K Light Chain

SEQ ID NO: 24027 - protein, 111 aa, Artificial Sequence; identical to SEQ ID NO: 22267
  Description of Artificial Sequence: Synthetic polypeptide
  VL of XENP020566

SEQ ID NO: 24028 - protein, 15 aa, Artificial Sequence
  Description of Artificial Sequence: Synthetic peptide
  XENP020566 vlCDR1
KASQSVDYDGDSYMN

SEQ ID NO: 24029 - protein, 7 aa, Artificial Sequence
  Description of Artificial Sequence: Synthetic peptide
  XENP020566 vlCDR2
AASNLES

SEQ ID NO: 24030 - protein, 9 aa, Artificial Sequence
  Description of Artificial Sequence: Synthetic peptide
  XENP020566 vlCDR3
QQSNEDPFT

SEQ ID NO: 24031 - protein, 450 aa, Artificial Sequence
  Description of Artificial Sequence: Synthetic polypeptide
  XENP020567 7G8_H0.115_L0_IgG1_PVA_/S267K Heavy Chain
EVKLEESGGGLVQPGGSMKLSCAASGFTFSDAWMDWVRQSPEKGLEWVAEIRTKANNHATYYAESVKGRFTISRDDSKSSVYLQMNSLRAEDTGIYYCTRLTNWDWYFDVWGAGTTVTVSSASTKGPSVFPLAPSSKSTSGGTAALGCLVKDYFPEPVTVSWNSGALTSGVHTFPAVLQSSGLYSLSSVVTVPSSSLGTQTYICNVNHKPSDTKVDKKVEPKSCDKTHTCPPCPAPPVAGPSVFLFPPKPKDTLMISRTPEVTCVVVDVKHEDPEVKFNWYVDGVEVHNAKTKPREEEYNSTYRVVSVLTVLHQDWLNGKEYKCKVSNKALPAPIEKTISKAKGQPREPQVYTLPPSREEMTKNQVSLTCDVSGFYPSDIAVEWESDGQPENNYKTTPPVLDSDGSFFLYSKLTVDKSRWEQGDVFSCSVMHEALHNHYTQKSLSLSPGK

SEQ ID NO: 24032 - protein, 121 aa, Artificial Sequence
  Description of Artificial Sequence: Synthetic polypeptide
  VH of XENP020567
EVKLEESGGGLVQPGGSMKLSCAASGFTFSDAWMDWVRQSPEKGLEWVAEIRTKANNHATYYAESVKGRFTISRDDSKSSVYLQMNSLRAEDTGIYYCTRLTNWDWYFDVWGAGTTVTVSS

SEQ ID NO: 24033 - protein, 5 aa, Artificial Sequence
  Description of Artificial Sequence: Synthetic peptide
  XENP020567 vhCDR1
DAWMD

SEQ ID NO: 24034 - protein, 19 aa, Artificial Sequence
  Description of Artificial Sequence: Synthetic peptide
  XENP020567 vhCDR2
EIRTKANNHATYYAESVKG

SEQ ID NO: 24035 - protein, 10 aa, Artificial Sequence
  Description of Artificial Sequence: Synthetic peptide
  XENP020567 vhCDR3
LTNWDWYFDV

SEQ ID NO: 24036 - protein, 218 aa, Artificial Sequence; identical to SEQ ID NO: 22266
  Description of Artificial Sequence: Synthetic polypeptide
  XENP020567 7G8_H0.115_L0_IgG1_PVA_/S267K Light Chain

SEQ ID NO: 24037 - protein, 111 aa, Artificial Sequence; identical to SEQ ID NO: 22267
  Description of Artificial Sequence: Synthetic polypeptide
  VL of XENP020567

SEQ ID NO: 24038 - protein, 15 aa, Artificial Sequence
  Description of Artificial Sequence: Synthetic peptide
  XENP020567 vlCDR1
KASQSVDYDGDSYMN

SEQ ID NO: 24039 - protein, 7 aa, Artificial Sequence
  Description of Artificial Sequence: Synthetic peptide
  XENP020567 vlCDR2
AASNLES

SEQ ID NO: 24040 - protein, 9 aa, Artificial Sequence
  Description of Artificial Sequence: Synthetic peptide
  XENP020567 vlCDR3
QQSNEDPFT

SEQ ID NO: 24041 - protein, 450 aa, Artificial Sequence
  Description of Artificial Sequence: Synthetic polypeptide
  XENP020568 7G8_H0.116_L0_IgG1_PVA_/S267K Heavy Chain
EVKLEESGGGLVQPGGSMKLSCAASGFTFSDAWMDWVRQSPEKGLEWVAEIRTKANNHATYYAESVKGRFTISRDDSKSSVYLQMNSLRAEDTGIYYCTRLGNWDWYFDVWGAGTTVTVSSASTKGPSVFPLAPSSKSTSGGTAALGCLVKDYFPEPVTVSWNSGALTSGVHTFPAVLQSSGLYSLSSVVTVPSSSLGTQTYICNVNHKPSDTKVDKKVEPKSCDKTHTCPPCPAPPVAGPSVFLFPPKPKDTLMISRTPEVTCVVVDVKHEDPEVKFNWYVDGVEVHNAKTKPREEEYNSTYRVVSVLTVLHQDWLNGKEYKCKVSNKALPAPIEKTISKAKGQPREPQVYTLPPSREEMTKNQVSLTCDVSGFYPSDIAVEWESDGQPENNYKTTPPVLDSDGSFFLYSKLTVDKSRWEQGDVFSCSVMHEALHNHYTQKSLSLSPGK

SEQ ID NO: 24042 - protein, 121 aa, Artificial Sequence
  Description of Artificial Sequence: Synthetic polypeptide
  VH of XENP020568
EVKLEESGGGLVQPGGSMKLSCAASGFTFSDAWMDWVRQSPEKGLEWVAEIRTKANNHATYYAESVKGRFTISRDDSKSSVYLQMNSLRAEDTGIYYCTRLGNWDWYFDVWGAGTTVTVSS

SEQ ID NO: 24043 - protein, 5 aa, Artificial Sequence
  Description of Artificial Sequence: Synthetic peptide
  XENP020568 vhCDR1
DAWMD

SEQ ID NO: 24044 - protein, 19 aa, Artificial Sequence
  Description of Artificial Sequence: Synthetic peptide
  XENP020568 vhCDR2
EIRTKANNHATYYAESVKG

SEQ ID NO: 24045 - protein, 10 aa, Artificial Sequence
  Description of Artificial Sequence: Synthetic peptide
  XENP020568 vhCDR3
LGNWDWYFDV

SEQ ID NO: 24046 - protein, 218 aa, Artificial Sequence; identical to SEQ ID NO: 22266
  Description of Artificial Sequence: Synthetic polypeptide
  XENP020568 7G8_H0.116_L0_IgG1_PVA_/S267K Light Chain

SEQ ID NO: 24047 - protein, 111 aa, Artificial Sequence; identical to SEQ ID NO: 22267
  Description of Artificial Sequence: Synthetic polypeptide
  VL of XENP020568

SEQ ID NO: 24048 - protein, 15 aa, Artificial Sequence
  Description of Artificial Sequence: Synthetic peptide
  XENP020568 vlCDR1
KASQSVDYDGDSYMN

SEQ ID NO: 24049 - protein, 7 aa, Artificial Sequence
  Description of Artificial Sequence: Synthetic peptide
  XENP020568 vlCDR2
AASNLES

SEQ ID NO: 24050 - protein, 9 aa, Artificial Sequence
  Description of Artificial Sequence: Synthetic peptide
  XENP020568 vlCDR3
QQSNEDPFT

SEQ ID NO: 24051 - protein, 450 aa, Artificial Sequence
  Description of Artificial Sequence: Synthetic polypeptide
  XENP020569 7G8_H0.117_L0_IgG1_PVA_/S267K Heavy Chain
EVKLEESGGGLVQPGGSMKLSCAASGFTFSDAWMDWVRQSPEKGLEWVAEIRTKANNHATYYAESVKGRFTISRDDSKSSVYLQMNSLRAEDTGIYYCTRLHNWDWYFDVWGAGTTVTVSSASTKGPSVFPLAPSSKSTSGGTAALGCLVKDYFPEPVTVSWNSGALTSGVHTFPAVLQSSGLYSLSSVVTVPSSSLGTQTYICNVNHKPSDTKVDKKVEPKSCDKTHTCPPCPAPPVAGPSVFLFPPKPKDTLMISRTPEVTCVVVDVKHEDPEVKFNWYVDGVEVHNAKTKPREEEYNSTYRVVSVLTVLHQDWLNGKEYKCKVSNKALPAPIEKTISKAKGQPREPQVYTLPPSREEMTKNQVSLTCDVSGFYPSDIAVEWESDGQPENNYKTTPPVLDSDGSFFLYSKLTVDKSRWEQGDVFSCSVMHEALHNHYTQKSLSLSPGK

SEQ ID NO: 24052 - protein, 121 aa, Artificial Sequence
  Description of Artificial Sequence: Synthetic polypeptide
  VH of XENP020569
EVKLEESGGGLVQPGGSMKLSCAASGFTFSDAWMDWVRQSPEKGLEWVAEIRTKANNHATYYAESVKGRFTISRDDSKSSVYLQMNSLRAEDTGIYYCTRLHNWDWYFDVWGAGTTVTVSS

SEQ ID NO: 24053 - protein, 5 aa, Artificial Sequence
  Description of Artificial Sequence: Synthetic peptide
  XENP020569 vhCDR1
DAWMD

SEQ ID NO: 24054 - protein, 19 aa, Artificial Sequence
  Description of Artificial Sequence: Synthetic peptide
  XENP020569 vhCDR2
EIRTKANNHATYYAESVKG

SEQ ID NO: 24055 - protein, 10 aa, Artificial Sequence
  Description of Artificial Sequence: Synthetic peptide
  XENP020569 vhCDR3
LHNWDWYFDV

SEQ ID NO: 24056 - protein, 218 aa, Artificial Sequence; identical to SEQ ID NO: 22266
  Description of Artificial Sequence: Synthetic polypeptide
  XENP020569 7G8_H0.117_L0_IgG1_PVA_/S267K Light Chain

SEQ ID NO: 24057 - protein, 111 aa, Artificial Sequence; identical to SEQ ID NO: 22267
  Description of Artificial Sequence: Synthetic polypeptide
  VL of XENP020569

SEQ ID NO: 24058 - protein, 15 aa, Artificial Sequence
  Description of Artificial Sequence: Synthetic peptide
  XENP020569 vlCDR1
KASQSVDYDGDSYMN

SEQ ID NO: 24059 - protein, 7 aa, Artificial Sequence
  Description of Artificial Sequence: Synthetic peptide
  XENP020569 vlCDR2
AASNLES

SEQ ID NO: 24060 - protein, 9 aa, Artificial Sequence
  Description of Artificial Sequence: Synthetic peptide
  XENP020569 vlCDR3
QQSNEDPFT

SEQ ID NO: 24061 - protein, 450 aa, Artificial Sequence
  Description of Artificial Sequence: Synthetic polypeptide
  XENP020570 7G8_H0.118_L0_IgG1_PVA_/S267K Heavy Chain
EVKLEESGGGLVQPGGSMKLSCAASGFTFSDAWMDWVRQSPEKGLEWVAEIRTKANNHATYYAESVKGRFTISRDDSKSSVYLQMNSLRAEDTGIYYCTRLQNWDWYFDVWGAGTTVTVSSASTKGPSVFPLAPSSKSTSGGTAALGCLVKDYFPEPVTVSWNSGALTSGVHTFPAVLQSSGLYSLSSVVTVPSSSLGTQTYICNVNHKPSDTKVDKKVEPKSCDKTHTCPPCPAPPVAGPSVFLFPPKPKDTLMISRTPEVTCVVVDVKHEDPEVKFNWYVDGVEVHNAKTKPREEEYNSTYRVVSVLTVLHQDWLNGKEYKCKVSNKALPAPIEKTISKAKGQPREPQVYTLPPSREEMTKNQVSLTCDVSGFYPSDIAVEWESDGQPENNYKTTPPVLDSDGSFFLYSKLTVDKSRWEQGDVFSCSVMHEALHNHYTQKSLSLSPGK

SEQ ID NO: 24062 - protein, 121 aa, Artificial Sequence
  Description of Artificial Sequence: Synthetic polypeptide
  VH of XENP020570
EVKLEESGGGLVQPGGSMKLSCAASGFTFSDAWMDWVRQSPEKGLEWVAEIRTKANNHATYYAESVKGRFTISRDDSKSSVYLQMNSLRAEDTGIYYCTRLQNWDWYFDVWGAGTTVTVSS

SEQ ID NO: 24063 - protein, 5 aa, Artificial Sequence
  Description of Artificial Sequence: Synthetic peptide
  XENP020570 vhCDR1
DAWMD

SEQ ID NO: 24064 - protein, 19 aa, Artificial Sequence
  Description of Artificial Sequence: Synthetic peptide
  XENP020570 vhCDR2
EIRTKANNHATYYAESVKG

SEQ ID NO: 24065 - protein, 10 aa, Artificial Sequence
  Description of Artificial Sequence: Synthetic peptide
  XENP020570 vhCDR3
LQNWDWYFDV

SEQ ID NO: 24066 - protein, 218 aa, Artificial Sequence; identical to SEQ ID NO: 22266
  Description of Artificial Sequence: Synthetic polypeptide
  XENP020570 7G8_H0.118_L0_IgG1_PVA_/S267K Light Chain

SEQ ID NO: 24067 - protein, 111 aa, Artificial Sequence; identical to SEQ ID NO: 22267
  Description of Artificial Sequence: Synthetic polypeptide
  VL of XENP020570

SEQ ID NO: 24068 - protein, 15 aa, Artificial Sequence
  Description of Artificial Sequence: Synthetic peptide
  XENP020570 vlCDR1
KASQSVDYDGDSYMN

SEQ ID NO: 24069 - protein, 7 aa, Artificial Sequence
  Description of Artificial Sequence: Synthetic peptide
  XENP020570 vlCDR2
AASNLES

SEQ ID NO: 24070 - protein, 9 aa, Artificial Sequence
  Description of Artificial Sequence: Synthetic peptide
  XENP020570 vlCDR3
QQSNEDPFT

SEQ ID NO: 24071 - protein, 450 aa, Artificial Sequence
  Description of Artificial Sequence: Synthetic polypeptide
  XENP020571 7G8_H0.119_L0_IgG1_PVA_/S267K Heavy Chain
EVKLEESGGGLVQPGGSMKLSCAASGFTFSDAWMDWVRQSPEKGLEWVAEIRTKANNHATYYAESVKGRFTISRDDSKSSVYLQMNSLRAEDTGIYYCTRLDNWDWYFDVWGAGTTVTVSSASTKGPSVFPLAPSSKSTSGGTAALGCLVKDYFPEPVTVSWNSGALTSGVHTFPAVLQSSGLYSLSSVVTVPSSSLGTQTYICNVNHKPSDTKVDKKVEPKSCDKTHTCPPCPAPPVAGPSVFLFPPKPKDTLMISRTPEVTCVVVDVKHEDPEVKFNWYVDGVEVHNAKTKPREEEYNSTYRVVSVLTVLHQDWLNGKEYKCKVSNKALPAPIEKTISKAKGQPREPQVYTLPPSREEMTKNQVSLTCDVSGFYPSDIAVEWESDGQPENNYKTTPPVLDSDGSFFLYSKLTVDKSRWEQGDVFSCSVMHEALHNHYTQKSLSLSPGK

SEQ ID NO: 24072 - protein, 121 aa, Artificial Sequence
  Description of Artificial Sequence: Synthetic polypeptide
  VH of XENP020571
EVKLEESGGGLVQPGGSMKLSCAASGFTFSDAWMDWVRQSPEKGLEWVAEIRTKANNHATYYAESVKGRFTISRDDSKSSVYLQMNSLRAEDTGIYYCTRLDNWDWYFDVWGAGTTVTVSS

SEQ ID NO: 24073 - protein, 5 aa, Artificial Sequence
  Description of Artificial Sequence: Synthetic peptide
  XENP020571 vhCDR1
DAWMD

SEQ ID NO: 24074 - protein, 19 aa, Artificial Sequence
  Description of Artificial Sequence: Synthetic peptide
  XENP020571 vhCDR2
EIRTKANNHATYYAESVKG

SEQ ID NO: 24075 - protein, 10 aa, Artificial Sequence
  Description of Artificial Sequence: Synthetic peptide
  XENP020571 vhCDR3
LDNWDWYFDV

SEQ ID NO: 24076 - protein, 218 aa, Artificial Sequence; identical to SEQ ID NO: 22266
  Description of Artificial Sequence: Synthetic polypeptide
  XENP020571 7G8_H0.119_L0_IgG1_PVA_/S267K Light Chain

SEQ ID NO: 24077 - protein, 111 aa, Artificial Sequence; identical to SEQ ID NO: 22267
  Description of Artificial Sequence: Synthetic polypeptide
  VL of XENP020571

SEQ ID NO: 24078 - protein, 15 aa, Artificial Sequence
  Description of Artificial Sequence: Synthetic peptide
  XENP020571 vlCDR1
KASQSVDYDGDSYMN

SEQ ID NO: 24079 - protein, 7 aa, Artificial Sequence
  Description of Artificial Sequence: Synthetic peptide
  XENP020571 vlCDR2
AASNLES

SEQ ID NO: 24080 - protein, 9 aa, Artificial Sequence
  Description of Artificial Sequence: Synthetic peptide
  XENP020571 vlCDR3
QQSNEDPFT

SEQ ID NO: 24081 - protein, 450 aa, Artificial Sequence
  Description of Artificial Sequence: Synthetic polypeptide
  XENP020572 7G8_H0.120_L0_IgG1_PVA_/S267K Heavy Chain
EVKLEESGGGLVQPGGSMKLSCAASGFTFSDAWMDWVRQSPEKGLEWVAEIRTKANNHATYYAESVKGRFTISRDDSKSSVYLQMNSLRAEDTGIYYCTRLLNWDWYFDVWGAGTTVTVSSASTKGPSVFPLAPSSKSTSGGTAALGCLVKDYFPEPVTVSWNSGALTSGVHTFPAVLQSSGLYSLSSVVTVPSSSLGTQTYICNVNHKPSDTKVDKKVEPKSCDKTHTCPPCPAPPVAGPSVFLFPPKPKDTLMISRTPEVTCVVVDVKHEDPEVKFNWYVDGVEVHNAKTKPREEEYNSTYRVVSVLTVLHQDWLNGKEYKCKVSNKALPAPIEKTISKAKGQPREPQVYTLPPSREEMTKNQVSLTCDVSGFYPSDIAVEWESDGQPENNYKTTPPVLDSDGSFFLYSKLTVDKSRWEQGDVFSCSVMHEALHNHYTQKSLSLSPGK

SEQ ID NO: 24082 - protein, 121 aa, Artificial Sequence
  Description of Artificial Sequence: Synthetic polypeptide
  VH of XENP020572
EVKLEESGGGLVQPGGSMKLSCAASGFTFSDAWMDWVRQSPEKGLEWVAEIRTKANNHATYYAESVKGRFTISRDDSKSSVYLQMNSLRAEDTGIYYCTRLLNWDWYFDVWGAGTTVTVSS

SEQ ID NO: 24083 - protein, 5 aa, Artificial Sequence
  Description of Artificial Sequence: Synthetic peptide
  XENP020572 vhCDR1
DAWMD

SEQ ID NO: 24084 - protein, 19 aa, Artificial Sequence
  Description of Artificial Sequence: Synthetic peptide
  XENP020572 vhCDR2
EIRTKANNHATYYAESVKG

SEQ ID NO: 24085 - protein, 10 aa, Artificial Sequence
  Description of Artificial Sequence: Synthetic peptide
  XENP020572 vhCDR3
LLNWDWYFDV

SEQ ID NO: 24086 - protein, 218 aa, Artificial Sequence; identical to SEQ ID NO: 22266
  Description of Artificial Sequence: Synthetic polypeptide
  XENP020572 7G8_H0.120_L0_IgG1_PVA_/S267K Light Chain

SEQ ID NO: 24087 - protein, 111 aa, Artificial Sequence; identical to SEQ ID NO: 22267
  Description of Artificial Sequence: Synthetic polypeptide
  VL of XENP020572

SEQ ID NO: 24088 - protein, 15 aa, Artificial Sequence
  Description of Artificial Sequence: Synthetic peptide
  XENP020572 vlCDR1
KASQSVDYDGDSYMN

SEQ ID NO: 24089 - protein, 7 aa, Artificial Sequence
  Description of Artificial Sequence: Synthetic peptide
  XENP020572 vlCDR2
AASNLES

SEQ ID NO: 24090 - protein, 9 aa, Artificial Sequence
  Description of Artificial Sequence: Synthetic peptide
  XENP020572 vlCDR3
QQSNEDPFT

SEQ ID NO: 24091 - protein, 450 aa, Artificial Sequence
  Description of Artificial Sequence: Synthetic polypeptide
  XENP020573 7G8_H0.121_L0_IgG1_PVA_/S267K Heavy Chain
EVKLEESGGGLVQPGGSMKLSCAASGFTFSDAWMDWVRQSPEKGLEWVAEIRTKANNHATYYAESVKGRFTISRDDSKSSVYLQMNSLRAEDTGIYYCTRLKNWDWYFDVWGAGTTVTVSSASTKGPSVFPLAPSSKSTSGGTAALGCLVKDYFPEPVTVSWNSGALTSGVHTFPAVLQSSGLYSLSSVVTVPSSSLGTQTYICNVNHKPSDTKVDKKVEPKSCDKTHTCPPCPAPPVAGPSVFLFPPKPKDTLMISRTPEVTCVVVDVKHEDPEVKFNWYVDGVEVHNAKTKPREEEYNSTYRVVSVLTVLHQDWLNGKEYKCKVSNKALPAPIEKTISKAKGQPREPQVYTLPPSREEMTKNQVSLTCDVSGFYPSDIAVEWESDGQPENNYKTTPPVLDSDGSFFLYSKLTVDKSRWEQGDVFSCSVMHEALHNHYTQKSLSLSPGK

SEQ ID NO: 24092 - protein, 121 aa, Artificial Sequence
  Description of Artificial Sequence: Synthetic polypeptide
  VH of XENP020573
EVKLEESGGGLVQPGGSMKLSCAASGFTFSDAWMDWVRQSPEKGLEWVAEIRTKANNHATYYAESVKGRFTISRDDSKSSVYLQMNSLRAEDTGIYYCTRLKNWDWYFDVWGAGTTVTVSS

SEQ ID NO: 24093 - protein, 5 aa, Artificial Sequence
  Description of Artificial Sequence: Synthetic peptide
  XENP020573 vhCDR1
DAWMD

SEQ ID NO: 24094 - protein, 19 aa, Artificial Sequence
  Description of Artificial Sequence: Synthetic peptide
  XENP020573 vhCDR2
EIRTKANNHATYYAESVKG

SEQ ID NO: 24095 - protein, 10 aa, Artificial Sequence
  Description of Artificial Sequence: Synthetic peptide
  XENP020573 vhCDR3
LKNWDWYFDV

SEQ ID NO: 24096 - protein, 218 aa, Artificial Sequence; identical to SEQ ID NO: 22266
  Description of Artificial Sequence: Synthetic polypeptide
  XENP020573 7G8_H0.121_L0_IgG1_PVA_/S267K Light Chain

SEQ ID NO: 24097 - protein, 111 aa, Artificial Sequence; identical to SEQ ID NO: 22267
  Description of Artificial Sequence: Synthetic polypeptide
  VL of XENP020573

SEQ ID NO: 24098 - protein, 15 aa, Artificial Sequence
  Description of Artificial Sequence: Synthetic peptide
  XENP020573 vlCDR1
KASQSVDYDGDSYMN

SEQ ID NO: 24099 - protein, 7 aa, Artificial Sequence
  Description of Artificial Sequence: Synthetic peptide
  XENP020573 vlCDR2
AASNLES

SEQ ID NO: 24100 - protein, 9 aa, Artificial Sequence
  Description of Artificial Sequence: Synthetic peptide
  XENP020573 vlCDR3
QQSNEDPFT

SEQ ID NO: 24101 - protein, 450 aa, Artificial Sequence
  Description of Artificial Sequence: Synthetic polypeptide
  XENP020574 7G8_H0.122_L0_IgG1_PVA_/S267K Heavy Chain
EVKLEESGGGLVQPGGSMKLSCAASGFTFSDAWMDWVRQSPEKGLEWVAEIRTKANNHATYYAESVKGRFTISRDDSKSSVYLQMNSLRAEDTGIYYCTRLYNWDWYFDVWGAGTTVTVSSASTKGPSVFPLAPSSKSTSGGTAALGCLVKDYFPEPVTVSWNSGALTSGVHTFPAVLQSSGLYSLSSVVTVPSSSLGTQTYICNVNHKPSDTKVDKKVEPKSCDKTHTCPPCPAPPVAGPSVFLFPPKPKDTLMISRTPEVTCVVVDVKHEDPEVKFNWYVDGVEVHNAKTKPREEEYNSTYRVVSVLTVLHQDWLNGKEYKCKVSNKALPAPIEKTISKAKGQPREPQVYTLPPSREEMTKNQVSLTCDVSGFYPSDIAVEWESDGQPENNYKTTPPVLDSDGSFFLYSKLTVDKSRWEQGDVFSCSVMHEALHNHYTQKSLSLSPGK

SEQ ID NO: 24102 - protein, 121 aa, Artificial Sequence
  Description of Artificial Sequence: Synthetic polypeptide
  VH of XENP020574
EVKLEESGGGLVQPGGSMKLSCAASGFTFSDAWMDWVRQSPEKGLEWVAEIRTKANNHATYYAESVKGRFTISRDDSKSSVYLQMNSLRAEDTGIYYCTRLYNWDWYFDVWGAGTTVTVSS

SEQ ID NO: 24103 - protein, 5 aa, Artificial Sequence
  Description of Artificial Sequence: Synthetic peptide
  XENP020574 vhCDR1
DAWMD

SEQ ID NO: 24104 - protein, 19 aa, Artificial Sequence
  Description of Artificial Sequence: Synthetic peptide
  XENP020574 vhCDR2
EIRTKANNHATYYAESVKG

SEQ ID NO: 24105 - protein, 10 aa, Artificial Sequence
  Description of Artificial Sequence: Synthetic peptide
  XENP020574 vhCDR3
LYNWDWYFDV

SEQ ID NO: 24106 - protein, 218 aa, Artificial Sequence; identical to SEQ ID NO: 22266
  Description of Artificial Sequence: Synthetic polypeptide
  XENP020574 7G8_H0.122_L0_IgG1_PVA_/S267K Light Chain

SEQ ID NO: 24107 - protein, 111 aa, Artificial Sequence; identical to SEQ ID NO: 22267
  Description of Artificial Sequence: Synthetic polypeptide
  VL of XENP020574

SEQ ID NO: 24108 - protein, 15 aa, Artificial Sequence
  Description of Artificial Sequence: Synthetic peptide
  XENP020574 vlCDR1
KASQSVDYDGDSYMN

SEQ ID NO: 24109 - protein, 7 aa, Artificial Sequence
  Description of Artificial Sequence: Synthetic peptide
  XENP020574 vlCDR2
AASNLES

SEQ ID NO: 24110 - protein, 9 aa, Artificial Sequence
  Description of Artificial Sequence: Synthetic peptide
  XENP020574 vlCDR3
QQSNEDPFT

SEQ ID NO: 24111 - protein, 450 aa, Artificial Sequence
  Description of Artificial Sequence: Synthetic polypeptide
  XENP020575 7G8_H0.123_L0_IgG1_PVA_/S267K Heavy Chain
EVKLEESGGGLVQPGGSMKLSCAASGFTFSDAWMDWVRQSPEKGLEWVAEIRTKANNHATYYAESVKGRFTISRDDSKSSVYLQMNSLRAEDTGIYYCTRLADWDWYFDVWGAGTTVTVSSASTKGPSVFPLAPSSKSTSGGTAALGCLVKDYFPEPVTVSWNSGALTSGVHTFPAVLQSSGLYSLSSVVTVPSSSLGTQTYICNVNHKPSDTKVDKKVEPKSCDKTHTCPPCPAPPVAGPSVFLFPPKPKDTLMISRTPEVTCVVVDVKHEDPEVKFNWYVDGVEVHNAKTKPREEEYNSTYRVVSVLTVLHQDWLNGKEYKCKVSNKALPAPIEKTISKAKGQPREPQVYTLPPSREEMTKNQVSLTCDVSGFYPSDIAVEWESDGQPENNYKTTPPVLDSDGSFFLYSKLTVDKSRWEQGDVFSCSVMHEALHNHYTQKSLSLSPGK

SEQ ID NO: 24112 - protein, 121 aa, Artificial Sequence
  Description of Artificial Sequence: Synthetic polypeptide
  VH of XENP020575
EVKLEESGGGLVQPGGSMKLSCAASGFTFSDAWMDWVRQSPEKGLEWVAEIRTKANNHATYYAESVKGRFTISRDDSKSSVYLQMNSLRAEDTGIYYCTRLADWDWYFDVWGAGTTVTVSS

SEQ ID NO: 24113 - protein, 5 aa, Artificial Sequence
  Description of Artificial Sequence: Synthetic peptide
  XENP020575 vhCDR1
DAWMD

SEQ ID NO: 24114 - protein, 19 aa, Artificial Sequence
  Description of Artificial Sequence: Synthetic peptide
  XENP020575 vhCDR2
EIRTKANNHATYYAESVKG

SEQ ID NO: 24115 - protein, 10 aa, Artificial Sequence
  Description of Artificial Sequence: Synthetic peptide
  XENP020575 vhCDR3
LADWDWYFDV

SEQ ID NO: 24116 - protein, 218 aa, Artificial Sequence; identical to SEQ ID NO: 22266
  Description of Artificial Sequence: Synthetic polypeptide
  XENP020575 7G8_H0.123_L0_IgG1_PVA_/S267K Light Chain

SEQ ID NO: 24117 - protein, 111 aa, Artificial Sequence; identical to SEQ ID NO: 22267
  Description of Artificial Sequence: Synthetic polypeptide
  VL of XENP020575

SEQ ID NO: 24118 - protein, 15 aa, Artificial Sequence
  Description of Artificial Sequence: Synthetic peptide
  XENP020575 vlCDR1
KASQSVDYDGDSYMN

SEQ ID NO: 24119 - protein, 7 aa, Artificial Sequence
  Description of Artificial Sequence: Synthetic peptide
  XENP020575 vlCDR2
AASNLES

SEQ ID NO: 24120 - protein, 9 aa, Artificial Sequence
  Description of Artificial Sequence: Synthetic peptide
  XENP020575 vlCDR3
QQSNEDPFT

SEQ ID NO: 24121 - protein, 450 aa, Artificial Sequence
  Description of Artificial Sequence: Synthetic polypeptide
  XENP020576 7G8_H0.124_L0_IgG1_PVA_/S267K Heavy Chain
EVKLEESGGGLVQPGGSMKLSCAASGFTFSDAWMDWVRQSPEKGLEWVAEIRTKANNHATYYAESVKGRFTISRDDSKSSVYLQMNSLRAEDTGIYYCTRLAHWDWYFDVWGAGTTVTVSSASTKGPSVFPLAPSSKSTSGGTAALGCLVKDYFPEPVTVSWNSGALTSGVHTFPAVLQSSGLYSLSSVVTVPSSSLGTQTYICNVNHKPSDTKVDKKVEPKSCDKTHTCPPCPAPPVAGPSVFLFPPKPKDTLMISRTPEVTCVVVDVKHEDPEVKFNWYVDGVEVHNAKTKPREEEYNSTYRVVSVLTVLHQDWLNGKEYKCKVSNKALPAPIEKTISKAKGQPREPQVYTLPPSREEMTKNQVSLTCDVSGFYPSDIAVEWESDGQPENNYKTTPPVLDSDGSFFLYSKLTVDKSRWEQGDVFSCSVMHEALHNHYTQKSLSLSPGK

SEQ ID NO: 24122 - protein, 121 aa, Artificial Sequence
  Description of Artificial Sequence: Synthetic polypeptide
  VH of XENP020576
EVKLEESGGGLVQPGGSMKLSCAASGFTFSDAWMDWVRQSPEKGLEWVAEIRTKANNHATYYAESVKGRFTISRDDSKSSVYLQMNSLRAEDTGIYYCTRLAHWDWYFDVWGAGTTVTVSS

SEQ ID NO: 24123 - protein, 5 aa, Artificial Sequence
  Description of Artificial Sequence: Synthetic peptide
  XENP020576 vhCDR1
DAWMD

SEQ ID NO: 24124 - protein, 19 aa, Artificial Sequence
  Description of Artificial Sequence: Synthetic peptide
  XENP020576 vhCDR2
EIRTKANNHATYYAESVKG

SEQ ID NO: 24125 - protein, 10 aa, Artificial Sequence
  Description of Artificial Sequence: Synthetic peptide
  XENP020576 vhCDR3
LAHWDWYFDV

SEQ ID NO: 24126 - protein, 218 aa, Artificial Sequence; identical to SEQ ID NO: 22266
  Description of Artificial Sequence: Synthetic polypeptide
  XENP020576 7G8_H0.124_L0_IgG1_PVA_/S267K Light Chain

SEQ ID NO: 24127 - protein, 111 aa, Artificial Sequence; identical to SEQ ID NO: 22267
  Description of Artificial Sequence: Synthetic polypeptide
  VL of XENP020576

SEQ ID NO: 24128 - protein, 15 aa, Artificial Sequence
  Description of Artificial Sequence: Synthetic peptide
  XENP020576 vlCDR1
KASQSVDYDGDSYMN

SEQ ID NO: 24129 - protein, 7 aa, Artificial Sequence
  Description of Artificial Sequence: Synthetic peptide
  XENP020576 vlCDR2
AASNLES

SEQ ID NO: 24130 - protein, 9 aa, Artificial Sequence
  Description of Artificial Sequence: Synthetic peptide
  XENP020576 vlCDR3
QQSNEDPFT

SEQ ID NO: 24131 - protein, 450 aa, Artificial Sequence
  Description of Artificial Sequence: Synthetic polypeptide
  XENP020577 7G8_H0.125_L0_IgG1_PVA_/S267K Heavy Chain
EVKLEESGGGLVQPGGSMKLSCAASGFTFSDAWMDWVRQSPEKGLEWVAEIRTKANNHATYYAESVKGRFTISRDDSKSSVYLQMNSLRAEDTGIYYCTRLAEWDWYFDVWGAGTTVTVSSASTKGPSVFPLAPSSKSTSGGTAALGCLVKDYFPEPVTVSWNSGALTSGVHTFPAVLQSSGLYSLSSVVTVPSSSLGTQTYICNVNHKPSDTKVDKKVEPKSCDKTHTCPPCPAPPVAGPSVFLFPPKPKDTLMISRTPEVTCVVVDVKHEDPEVKFNWYVDGVEVHNAKTKPREEEYNSTYRVVSVLTVLHQDWLNGKEYKCKVSNKALPAPIEKTISKAKGQPREPQVYTLPPSREEMTKNQVSLTCDVSGFYPSDIAVEWESDGQPENNYKTTPPVLDSDGSFFLYSKLTVDKSRWEQGDVFSCSVMHEALHNHYTQKSLSLSPGK

SEQ ID NO: 24132 - protein, 121 aa, Artificial Sequence
  Description of Artificial Sequence: Synthetic polypeptide
  VH of XENP020577
EVKLEESGGGLVQPGGSMKLSCAASGFTFSDAWMDWVRQSPEKGLEWVAEIRTKANNHATYYAESVKGRFTISRDDSKSSVYLQMNSLRAEDTGIYYCTRLAEWDWYFDVWGAGTTVTVSS

SEQ ID NO: 24133 - protein, 5 aa, Artificial Sequence
  Description of Artificial Sequence: Synthetic peptide
  XENP020577 vhCDR1
DAWMD

SEQ ID NO: 24134 - protein, 19 aa, Artificial Sequence
  Description of Artificial Sequence: Synthetic peptide
  XENP020577 vhCDR2
EIRTKANNHATYYAESVKG

SEQ ID NO: 24135 - protein, 10 aa, Artificial Sequence
  Description of Artificial Sequence: Synthetic peptide
  XENP020577 vhCDR3
LAEWDWYFDV

SEQ ID NO: 24136 - protein, 218 aa, Artificial Sequence; identical to SEQ ID NO: 22266
  Description of Artificial Sequence: Synthetic polypeptide
  XENP020577 7G8_H0.125_L0_IgG1_PVA_/S267K Light Chain

SEQ ID NO: 24137 - protein, 111 aa, Artificial Sequence; identical to SEQ ID NO: 22267
  Description of Artificial Sequence: Synthetic polypeptide
  VL of XENP020577

SEQ ID NO: 24138 - protein, 15 aa, Artificial Sequence
  Description of Artificial Sequence: Synthetic peptide
  XENP020577 vlCDR1
KASQSVDYDGDSYMN

SEQ ID NO: 24139 - protein, 7 aa, Artificial Sequence
  Description of Artificial Sequence: Synthetic peptide
  XENP020577 vlCDR2
AASNLES

SEQ ID NO: 24140 - protein, 9 aa, Artificial Sequence
  Description of Artificial Sequence: Synthetic peptide
  XENP020577 vlCDR3
QQSNEDPFT

SEQ ID NO: 24141 - protein, 450 aa, Artificial Sequence
  Description of Artificial Sequence: Synthetic polypeptide
  XENP020578 7G8_H0.126_L0_IgG1_PVA_/S267K Heavy Chain
EVKLEESGGGLVQPGGSMKLSCAASGFTFSDAWMDWVRQSPEKGLEWVAEIRTKANNHATYYAESVKGRFTISRDDSKSSVYLQMNSLRAEDTGIYYCTRLASWDWYFDVWGAGTTVTVSSASTKGPSVFPLAPSSKSTSGGTAALGCLVKDYFPEPVTVSWNSGALTSGVHTFPAVLQSSGLYSLSSVVTVPSSSLGTQTYICNVNHKPSDTKVDKKVEPKSCDKTHTCPPCPAPPVAGPSVFLFPPKPKDTLMISRTPEVTCVVVDVKHEDPEVKFNWYVDGVEVHNAKTKPREEEYNSTYRVVSVLTVLHQDWLNGKEYKCKVSNKALPAPIEKTISKAKGQPREPQVYTLPPSREEMTKNQVSLTCDVSGFYPSDIAVEWESDGQPENNYKTTPPVLDSDGSFFLYSKLTVDKSRWEQGDVFSCSVMHEALHNHYTQKSLSLSPGK

SEQ ID NO: 24142 - protein, 121 aa, Artificial Sequence
  Description of Artificial Sequence: Synthetic polypeptide
  VH of XENP020578
EVKLEESGGGLVQPGGSMKLSCAASGFTFSDAWMDWVRQSPEKGLEWVAEIRTKANNHATYYAESVKGRFTISRDDSKSSVYLQMNSLRAEDTGIYYCTRLASWDWYFDVWGAGTTVTVSS

SEQ ID NO: 24143 - protein, 5 aa, Artificial Sequence
  Description of Artificial Sequence: Synthetic peptide
  XENP020578 vhCDR1
DAWMD

SEQ ID NO: 24144 - protein, 19 aa, Artificial Sequence
  Description of Artificial Sequence: Synthetic peptide
  XENP020578 vhCDR2
EIRTKANNHATYYAESVKG

SEQ ID NO: 24145 - protein, 10 aa, Artificial Sequence
  Description of Artificial Sequence: Synthetic peptide
  XENP020578 vhCDR3
LASWDWYFDV

SEQ ID NO: 24146 - protein, 218 aa, Artificial Sequence; identical to SEQ ID NO: 22266
  Description of Artificial Sequence: Synthetic polypeptide
  XENP020578 7G8_H0.126_L0_IgG1_PVA_/S267K Light Chain

SEQ ID NO: 24147 - protein, 111 aa, Artificial Sequence; identical to SEQ ID NO: 22267
  Description of Artificial Sequence: Synthetic polypeptide
  VL of XENP020578

SEQ ID NO: 24148 - protein, 15 aa, Artificial Sequence
  Description of Artificial Sequence: Synthetic peptide
  XENP020578 vlCDR1
KASQSVDYDGDSYMN

SEQ ID NO: 24149 - protein, 7 aa, Artificial Sequence
  Description of Artificial Sequence: Synthetic peptide
  XENP020578 vlCDR2
AASNLES

SEQ ID NO: 24150 - protein, 9 aa, Artificial Sequence
  Description of Artificial Sequence: Synthetic peptide
  XENP020578 vlCDR3
QQSNEDPFT

SEQ ID NO: 24151 - protein, 450 aa, Artificial Sequence
  Description of Artificial Sequence: Synthetic polypeptide
  XENP020579 7G8_H0.127_L0_IgG1_PVA_/S267K Heavy Chain
EVKLEESGGGLVQPGGSMKLSCAASGFTFSDAWMDWVRQSPEKGLEWVAEIRTKANNHATYYAESVKGRFTISRDDSKSSVYLQMNSLRAEDTGIYYCTRLARWDWYFDVWGAGTTVTVSSASTKGPSVFPLAPSSKSTSGGTAALGCLVKDYFPEPVTVSWNSGALTSGVHTFPAVLQSSGLYSLSSVVTVPSSSLGTQTYICNVNHKPSDTKVDKKVEPKSCDKTHTCPPCPAPPVAGPSVFLFPPKPKDTLMISRTPEVTCVVVDVKHEDPEVKFNWYVDGVEVHNAKTKPREEEYNSTYRVVSVLTVLHQDWLNGKEYKCKVSNKALPAPIEKTISKAKGQPREPQVYTLPPSREEMTKNQVSLTCDVSGFYPSDIAVEWESDGQPENNYKTTPPVLDSDGSFFLYSKLTVDKSRWEQGDVFSCSVMHEALHNHYTQKSLSLSPGK

SEQ ID NO: 24152 - protein, 121 aa, Artificial Sequence
  Description of Artificial Sequence: Synthetic polypeptide
  VH of XENP020579
EVKLEESGGGLVQPGGSMKLSCAASGFTFSDAWMDWVRQSPEKGLEWVAEIRTKANNHATYYAESVKGRFTISRDDSKSSVYLQMNSLRAEDTGIYYCTRLARWDWYFDVWGAGTTVTVSS

SEQ ID NO: 24153 - protein, 5 aa, Artificial Sequence
  Description of Artificial Sequence: Synthetic peptide
  XENP020579 vhCDR1
DAWMD

SEQ ID NO: 24154 - protein, 19 aa, Artificial Sequence
  Description of Artificial Sequence: Synthetic peptide
  XENP020579 vhCDR2
EIRTKANNHATYYAESVKG

SEQ ID NO: 24155 - protein, 10 aa, Artificial Sequence
  Description of Artificial Sequence: Synthetic peptide
  XENP020579 vhCDR3
LARWDWYFDV

SEQ ID NO: 24156 - protein, 218 aa, Artificial Sequence; identical to SEQ ID NO: 22266
  Description of Artificial Sequence: Synthetic polypeptide
  XENP020579 7G8_H0.127_L0_IgG1_PVA_/S267K Light Chain

SEQ ID NO: 24157 - protein, 111 aa, Artificial Sequence; identical to SEQ ID NO: 22267
  Description of Artificial Sequence: Synthetic polypeptide
  VL of XENP020579

SEQ ID NO: 24158 - protein, 15 aa, Artificial Sequence
  Description of Artificial Sequence: Synthetic peptide
  XENP020579 vlCDR1
KASQSVDYDGDSYMN

SEQ ID NO: 24159 - protein, 7 aa, Artificial Sequence
  Description of Artificial Sequence: Synthetic peptide
  XENP020579 vlCDR2
AASNLES

SEQ ID NO: 24160 - protein, 9 aa, Artificial Sequence
  Description of Artificial Sequence: Synthetic peptide
  XENP020579 vlCDR3
QQSNEDPFT

SEQ ID NO: 24161 - protein, 450 aa, Artificial Sequence
  Description of Artificial Sequence: Synthetic polypeptide
  XENP020580 7G8_H0.128_L0_IgG1_PVA_/S267K Heavy Chain
EVKLEESGGGLVQPGGSMKLSCAASGFTFSDAWMDWVRQSPEKGLEWVAEIRTKANNHATYYAESVKGRFTISRDDSKSSVYLQMNSLRAEDTGIYYCTRLALWDWYFDVWGAGTTVTVSSASTKGPSVFPLAPSSKSTSGGTAALGCLVKDYFPEPVTVSWNSGALTSGVHTFPAVLQSSGLYSLSSVVTVPSSSLGTQTYICNVNHKPSDTKVDKKVEPKSCDKTHTCPPCPAPPVAGPSVFLFPPKPKDTLMISRTPEVTCVVVDVKHEDPEVKFNWYVDGVEVHNAKTKPREEEYNSTYRVVSVLTVLHQDWLNGKEYKCKVSNKALPAPIEKTISKAKGQPREPQVYTLPPSREEMTKNQVSLTCDVSGFYPSDIAVEWESDGQPENNYKTTPPVLDSDGSFFLYSKLTVDKSRWEQGDVFSCSVMHEALHNHYTQKSLSLSPGK

SEQ ID NO: 24162 - protein, 121 aa, Artificial Sequence
  Description of Artificial Sequence: Synthetic polypeptide
  VH of XENP020580
EVKLEESGGGLVQPGGSMKLSCAASGFTFSDAWMDWVRQSPEKGLEWVAEIRTKANNHATYYAESVKGRFTISRDDSKSSVYLQMNSLRAEDTGIYYCTRLALWDWYFDVWGAGTTVTVSS

SEQ ID NO: 24163 - protein, 5 aa, Artificial Sequence
  Description of Artificial Sequence: Synthetic peptide
  XENP020580 vhCDR1
DAWMD

SEQ ID NO: 24164 - protein, 19 aa, Artificial Sequence
  Description of Artificial Sequence: Synthetic peptide
  XENP020580 vhCDR2
EIRTKANNHATYYAESVKG

SEQ ID NO: 24165 - protein, 10 aa, Artificial Sequence
  Description of Artificial Sequence: Synthetic peptide
  XENP020580 vhCDR3
LALWDWYFDV

SEQ ID NO: 24166 - protein, 218 aa, Artificial Sequence; identical to SEQ ID NO: 22266
  Description of Artificial Sequence: Synthetic polypeptide
  XENP020580 7G8_H0.128_L0_IgG1_PVA_/S267K Light Chain

SEQ ID NO: 24167 - protein, 111 aa, Artificial Sequence; identical to SEQ ID NO: 22267
  Description of Artificial Sequence: Synthetic polypeptide
  VL of XENP020580

SEQ ID NO: 24168 - protein, 15 aa, Artificial Sequence
  Description of Artificial Sequence: Synthetic peptide
  XENP020580 vlCDR1
KASQSVDYDGDSYMN

SEQ ID NO: 24169 - protein, 7 aa, Artificial Sequence
  Description of Artificial Sequence: Synthetic peptide
  XENP020580 vlCDR2
AASNLES

SEQ ID NO: 24170 - protein, 9 aa, Artificial Sequence
  Description of Artificial Sequence: Synthetic peptide
  XENP020580 vlCDR3
QQSNEDPFT

SEQ ID NO: 24171 - protein, 450 aa, Artificial Sequence
  Description of Artificial Sequence: Synthetic polypeptide
  XENP020581 7G8_H0.129_L0_IgG1_PVA_/S267K Heavy Chain
EVKLEESGGGLVQPGGSMKLSCAASGFTFSDAWMDWVRQSPEKGLEWVAEIRTKANNHATYYAESVKGRFTISRDDSKSSVYLQMNSLRAEDTGIYYCTRLATWDWYFDVWGAGTTVTVSSASTKGPSVFPLAPSSKSTSGGTAALGCLVKDYFPEPVTVSWNSGALTSGVHTFPAVLQSSGLYSLSSVVTVPSSSLGTQTYICNVNHKPSDTKVDKKVEPKSCDKTHTCPPCPAPPVAGPSVFLFPPKPKDTLMISRTPEVTCVVVDVKHEDPEVKFNWYVDGVEVHNAKTKPREEEYNSTYRVVSVLTVLHQDWLNGKEYKCKVSNKALPAPIEKTISKAKGQPREPQVYTLPPSREEMTKNQVSLTCDVSGFYPSDIAVEWESDGQPENNYKTTPPVLDSDGSFFLYSKLTVDKSRWEQGDVFSCSVMHEALHNHYTQKSLSLSPGK

SEQ ID NO: 24172 - protein, 121 aa, Artificial Sequence
  Description of Artificial Sequence: Synthetic polypeptide
  VH of XENP020581
EVKLEESGGGLVQPGGSMKLSCAASGFTFSDAWMDWVRQSPEKGLEWVAEIRTKANNHATYYAESVKGRFTISRDDSKSSVYLQMNSLRAEDTGIYYCTRLATWDWYFDVWGAGTTVTVSS

SEQ ID NO: 24173 - protein, 5 aa, Artificial Sequence
  Description of Artificial Sequence: Synthetic peptide
  XENP020581 vhCDR1
DAWMD

SEQ ID NO: 24174 - protein, 19 aa, Artificial Sequence
  Description of Artificial Sequence: Synthetic peptide
  XENP020581 vhCDR2
EIRTKANNHATYYAESVKG

SEQ ID NO: 24175 - protein, 10 aa, Artificial Sequence
  Description of Artificial Sequence: Synthetic peptide
  XENP020581 vhCDR3
LATWDWYFDV

SEQ ID NO: 24176 - protein, 218 aa, Artificial Sequence; identical to SEQ ID NO: 22266
  Description of Artificial Sequence: Synthetic polypeptide
  XENP020581 7G8_H0.129_L0_IgG1_PVA_/S267K Light Chain

SEQ ID NO: 24177 - protein, 111 aa, Artificial Sequence; identical to SEQ ID NO: 22267
  Description of Artificial Sequence: Synthetic polypeptide
  VL of XENP020581

SEQ ID NO: 24178 - protein, 15 aa, Artificial Sequence
  Description of Artificial Sequence: Synthetic peptide
  XENP020581 vlCDR1
KASQSVDYDGDSYMN

SEQ ID NO: 24179 - protein, 7 aa, Artificial Sequence
  Description of Artificial Sequence: Synthetic peptide
  XENP020581 vlCDR2
AASNLES

SEQ ID NO: 24180 - protein, 9 aa, Artificial Sequence
  Description of Artificial Sequence: Synthetic peptide
  XENP020581 vlCDR3
QQSNEDPFT

SEQ ID NO: 24181 - protein, 450 aa, Artificial Sequence
  Description of Artificial Sequence: Synthetic polypeptide
  XENP020582 7G8_H0.130_L0_IgG1_PVA_/S267K Heavy Chain
EVKLEESGGGLVQPGGSMKLSCAASGFTFSDAWMDWVRQSPEKGLEWVAEIRTKANNHATYYAESVKGRFTISRDDSKSSVYLQMNSLRAEDTGIYYCTRLAGWDWYFDVWGAGTTVTVSSASTKGPSVFPLAPSSKSTSGGTAALGCLVKDYFPEPVTVSWNSGALTSGVHTFPAVLQSSGLYSLSSVVTVPSSSLGTQTYICNVNHKPSDTKVDKKVEPKSCDKTHTCPPCPAPPVAGPSVFLFPPKPKDTLMISRTPEVTCVVVDVKHEDPEVKFNWYVDGVEVHNAKTKPREEEYNSTYRVVSVLTVLHQDWLNGKEYKCKVSNKALPAPIEKTISKAKGQPREPQVYTLPPSREEMTKNQVSLTCDVSGFYPSDIAVEWESDGQPENNYKTTPPVLDSDGSFFLYSKLTVDKSRWEQGDVFSCSVMHEALHNHYTQKSLSLSPGK

SEQ ID NO: 24182 - protein, 121 aa, Artificial Sequence
  Description of Artificial Sequence: Synthetic polypeptide
  VH of XENP020582
EVKLEESGGGLVQPGGSMKLSCAASGFTFSDAWMDWVRQSPEKGLEWVAEIRTKANNHATYYAESVKGRFTISRDDSKSSVYLQMNSLRAEDTGIYYCTRLAGWDWYFDVWGAGTTVTVSS

SEQ ID NO: 24183 - protein, 5 aa, Artificial Sequence
  Description of Artificial Sequence: Synthetic peptide
  XENP020582 vhCDR1
DAWMD

SEQ ID NO: 24184 - protein, 19 aa, Artificial Sequence
  Description of Artificial Sequence: Synthetic peptide
  XENP020582 vhCDR2
EIRTKANNHATYYAESVKG

SEQ ID NO: 24185 - protein, 10 aa, Artificial Sequence
  Description of Artificial Sequence: Synthetic peptide
  XENP020582 vhCDR3
LAGWDWYFDV

SEQ ID NO: 24186 - protein, 218 aa, Artificial Sequence; identical to SEQ ID NO: 22266
  Description of Artificial Sequence: Synthetic polypeptide
  XENP020582 7G8_H0.130_L0_IgG1_PVA_/S267K Light Chain

SEQ ID NO: 24187 - protein, 111 aa, Artificial Sequence; identical to SEQ ID NO: 22267
  Description of Artificial Sequence: Synthetic polypeptide
  VL of XENP020582

SEQ ID NO: 24188 - protein, 15 aa, Artificial Sequence
  Description of Artificial Sequence: Synthetic peptide
  XENP020582 vlCDR1
KASQSVDYDGDSYMN

SEQ ID NO: 24189 - protein, 7 aa, Artificial Sequence
  Description of Artificial Sequence: Synthetic peptide
  XENP020582 vlCDR2
AASNLES

SEQ ID NO: 24190 - protein, 9 aa, Artificial Sequence
  Description of Artificial Sequence: Synthetic peptide
  XENP020582 vlCDR3
QQSNEDPFT

SEQ ID NO: 24191 - protein, 450 aa, Artificial Sequence
  Description of Artificial Sequence: Synthetic polypeptide
  XENP020583 7G8_H0.131_L0_IgG1_PVA_/S267K Heavy Chain
EVKLEESGGGLVQPGGSMKLSCAASGFTFSDAWMDWVRQSPEKGLEWVAEIRTKANNHATYYAESVKGRFTISRDDSKSSVYLQMNSLRAEDTGIYYCTRLAYWDWYFDVWGAGTTVTVSSASTKGPSVFPLAPSSKSTSGGTAALGCLVKDYFPEPVTVSWNSGALTSGVHTFPAVLQSSGLYSLSSVVTVPSSSLGTQTYICNVNHKPSDTKVDKKVEPKSCDKTHTCPPCPAPPVAGPSVFLFPPKPKDTLMISRTPEVTCVVVDVKHEDPEVKFNWYVDGVEVHNAKTKPREEEYNSTYRVVSVLTVLHQDWLNGKEYKCKVSNKALPAPIEKTISKAKGQPREPQVYTLPPSREEMTKNQVSLTCDVSGFYPSDIAVEWESDGQPENNYKTTPPVLDSDGSFFLYSKLTVDKSRWEQGDVFSCSVMHEALHNHYTQKSLSLSPGK

SEQ ID NO: 24192 - protein, 121 aa, Artificial Sequence
  Description of Artificial Sequence: Synthetic polypeptide
  VH of XENP020583
EVKLEESGGGLVQPGGSMKLSCAASGFTFSDAWMDWVRQSPEKGLEWVAEIRTKANNHATYYAESVKGRFTISRDDSKSSVYLQMNSLRAEDTGIYYCTRLAYWDWYFDVWGAGTTVTVSS

SEQ ID NO: 24193 - protein, 5 aa, Artificial Sequence
  Description of Artificial Sequence: Synthetic peptide
  XENP020583 vhCDR1
DAWMD

SEQ ID NO: 24194 - protein, 19 aa, Artificial Sequence
  Description of Artificial Sequence: Synthetic peptide
  XENP020583 vhCDR2
EIRTKANNHATYYAESVKG

SEQ ID NO: 24195 - protein, 10 aa, Artificial Sequence
  Description of Artificial Sequence: Synthetic peptide
  XENP020583 vhCDR3
LAYWDWYFDV

SEQ ID NO: 24196 - protein, 218 aa, Artificial Sequence; identical to SEQ ID NO: 22266
  Description of Artificial Sequence: Synthetic polypeptide
  XENP020583 7G8_H0.131_L0_IgG1_PVA_/S267K Light Chain

SEQ ID NO: 24197 - protein, 111 aa, Artificial Sequence; identical to SEQ ID NO: 22267
  Description of Artificial Sequence: Synthetic polypeptide
  VL of XENP020583

SEQ ID NO: 24198 - protein, 15 aa, Artificial Sequence
  Description of Artificial Sequence: Synthetic peptide
  XENP020583 vlCDR1
KASQSVDYDGDSYMN

SEQ ID NO: 24199 - protein, 7 aa, Artificial Sequence
  Description of Artificial Sequence: Synthetic peptide
  XENP020583 vlCDR2
AASNLES

SEQ ID NO: 24200 - protein, 9 aa, Artificial Sequence
  Description of Artificial Sequence: Synthetic peptide
  XENP020583 vlCDR3
QQSNEDPFT

SEQ ID NO: 24201 - protein, 450 aa, Artificial Sequence
  Description of Artificial Sequence: Synthetic polypeptide
  XENP020584 7G8_H0.132_L0_IgG1_PVA_/S267K Heavy Chain
EVKLEESGGGLVQPGGSMKLSCAASGFTFSDAWMDWVRQSPEKGLEWVAEIRTKANNHATYYAESVKGRFTISRDDSKSSVYLQMNSLRAEDTGIYYCTRLANFDWYFDVWGAGTTVTVSSASTKGPSVFPLAPSSKSTSGGTAALGCLVKDYFPEPVTVSWNSGALTSGVHTFPAVLQSSGLYSLSSVVTVPSSSLGTQTYICNVNHKPSDTKVDKKVEPKSCDKTHTCPPCPAPPVAGPSVFLFPPKPKDTLMISRTPEVTCVVVDVKHEDPEVKFNWYVDGVEVHNAKTKPREEEYNSTYRVVSVLTVLHQDWLNGKEYKCKVSNKALPAPIEKTISKAKGQPREPQVYTLPPSREEMTKNQVSLTCDVSGFYPSDIAVEWESDGQPENNYKTTPPVLDSDGSFFLYSKLTVDKSRWEQGDVFSCSVMHEALHNHYTQKSLSLSPGK

SEQ ID NO: 24202 - protein, 121 aa, Artificial Sequence
  Description of Artificial Sequence: Synthetic polypeptide
  VH of XENP020584
EVKLEESGGGLVQPGGSMKLSCAASGFTFSDAWMDWVRQSPEKGLEWVAEIRTKANNHATYYAESVKGRFTISRDDSKSSVYLQMNSLRAEDTGIYYCTRLANFDWYFDVWGAGTTVTVSS

SEQ ID NO: 24203 - protein, 5 aa, Artificial Sequence
  Description of Artificial Sequence: Synthetic peptide
  XENP020584 vhCDR1
DAWMD

SEQ ID NO: 24204 - protein, 19 aa, Artificial Sequence
  Description of Artificial Sequence: Synthetic peptide
  XENP020584 vhCDR2
EIRTKANNHATYYAESVKG

SEQ ID NO: 24205 - protein, 10 aa, Artificial Sequence
  Description of Artificial Sequence: Synthetic peptide
  XENP020584 vhCDR3
LANFDWYFDV

SEQ ID NO: 24206 - protein, 218 aa, Artificial Sequence; identical to SEQ ID NO: 22266
  Description of Artificial Sequence: Synthetic polypeptide
  XENP020584 7G8_H0.132_L0_IgG1_PVA_/S267K Light Chain

SEQ ID NO: 24207 - protein, 111 aa, Artificial Sequence; identical to SEQ ID NO: 22267
  Description of Artificial Sequence: Synthetic polypeptide
  VL of XENP020584

SEQ ID NO: 24208 - protein, 15 aa, Artificial Sequence
  Description of Artificial Sequence: Synthetic peptide
  XENP020584 vlCDR1
KASQSVDYDGDSYMN

SEQ ID NO: 24209 - protein, 7 aa, Artificial Sequence
  Description of Artificial Sequence: Synthetic peptide
  XENP020584 vlCDR2
AASNLES

SEQ ID NO: 24210 - protein, 9 aa, Artificial Sequence
  Description of Artificial Sequence: Synthetic peptide
  XENP020584 vlCDR3
QQSNEDPFT

SEQ ID NO: 24211 - protein, 450 aa, Artificial Sequence
  Description of Artificial Sequence: Synthetic polypeptide
  XENP020585 7G8_H0.133_L0_IgG1_PVA_/S267K Heavy Chain
EVKLEESGGGLVQPGGSMKLSCAASGFTFSDAWMDWVRQSPEKGLEWVAEIRTKANNHATYYAESVKGRFTISRDDSKSSVYLQMNSLRAEDTGIYYCTRLANLDWYFDVWGAGTTVTVSSASTKGPSVFPLAPSSKSTSGGTAALGCLVKDYFPEPVTVSWNSGALTSGVHTFPAVLQSSGLYSLSSVVTVPSSSLGTQTYICNVNHKPSDTKVDKKVEPKSCDKTHTCPPCPAPPVAGPSVFLFPPKPKDTLMISRTPEVTCVVVDVKHEDPEVKFNWYVDGVEVHNAKTKPREEEYNSTYRVVSVLTVLHQDWLNGKEYKCKVSNKALPAPIEKTISKAKGQPREPQVYTLPPSREEMTKNQVSLTCDVSGFYPSDIAVEWESDGQPENNYKTTPPVLDSDGSFFLYSKLTVDKSRWEQGDVFSCSVMHEALHNHYTQKSLSLSPGK

SEQ ID NO: 24212 - protein, 121 aa, Artificial Sequence
  Description of Artificial Sequence: Synthetic polypeptide
  VH of XENP020585
EVKLEESGGGLVQPGGSMKLSCAASGFTFSDAWMDWVRQSPEKGLEWVAEIRTKANNHATYYAESVKGRFTISRDDSKSSVYLQMNSLRAEDTGIYYCTRLANLDWYFDVWGAGTTVTVSS

SEQ ID NO: 24213 - protein, 5 aa, Artificial Sequence
  Description of Artificial Sequence: Synthetic peptide
  XENP020585 vhCDR1
DAWMD

SEQ ID NO: 24214 - protein, 19 aa, Artificial Sequence
  Description of Artificial Sequence: Synthetic peptide
  XENP020585 vhCDR2
EIRTKANNHATYYAESVKG

SEQ ID NO: 24215 - protein, 10 aa, Artificial Sequence
  Description of Artificial Sequence: Synthetic peptide
  XENP020585 vhCDR3
LANLDWYFDV

SEQ ID NO: 24216 - protein, 218 aa, Artificial Sequence; identical to SEQ ID NO: 22266
  Description of Artificial Sequence: Synthetic polypeptide
  XENP020585 7G8_H0.133_L0_IgG1_PVA_/S267K Light Chain

SEQ ID NO: 24217 - protein, 111 aa, Artificial Sequence; identical to SEQ ID NO: 22267
  Description of Artificial Sequence: Synthetic polypeptide
  VL of XENP020585

SEQ ID NO: 24218 - protein, 15 aa, Artificial Sequence
  Description of Artificial Sequence: Synthetic peptide
  XENP020585 vlCDR1
KASQSVDYDGDSYMN

SEQ ID NO: 24219 - protein, 7 aa, Artificial Sequence
  Description of Artificial Sequence: Synthetic peptide
  XENP020585 vlCDR2
AASNLES

SEQ ID NO: 24220 - protein, 9 aa, Artificial Sequence
  Description of Artificial Sequence: Synthetic peptide
  XENP020585 vlCDR3
QQSNEDPFT

SEQ ID NO: 24221 - protein, 450 aa, Artificial Sequence
  Description of Artificial Sequence: Synthetic polypeptide
  XENP020586 7G8_H0.134_L0_IgG1_PVA_/S267K Heavy Chain
EVKLEESGGGLVQPGGSMKLSCAASGFTFSDAWMDWVRQSPEKGLEWVAEIRTKANNHATYYAESVKGRFTISRDDSKSSVYLQMNSLRAEDTGIYYCTRLANYDWYFDVWGAGTTVTVSSASTKGPSVFPLAPSSKSTSGGTAALGCLVKDYFPEPVTVSWNSGALTSGVHTFPAVLQSSGLYSLSSVVTVPSSSLGTQTYICNVNHKPSDTKVDKKVEPKSCDKTHTCPPCPAPPVAGPSVFLFPPKPKDTLMISRTPEVTCVVVDVKHEDPEVKFNWYVDGVEVHNAKTKPREEEYNSTYRVVSVLTVLHQDWLNGKEYKCKVSNKALPAPIEKTISKAKGQPREPQVYTLPPSREEMTKNQVSLTCDVSGFYPSDIAVEWESDGQPENNYKTTPPVLDSDGSFFLYSKLTVDKSRWEQGDVFSCSVMHEALHNHYTQKSLSLSPGK

SEQ ID NO: 24222 - protein, 121 aa, Artificial Sequence
  Description of Artificial Sequence: Synthetic polypeptide
  VH of XENP020586
EVKLEESGGGLVQPGGSMKLSCAASGFTFSDAWMDWVRQSPEKGLEWVAEIRTKANNHATYYAESVKGRFTISRDDSKSSVYLQMNSLRAEDTGIYYCTRLANYDWYFDVWGAGTTVTVSS

SEQ ID NO: 24223 - protein, 5 aa, Artificial Sequence
  Description of Artificial Sequence: Synthetic peptide
  XENP020586 vhCDR1
DAWMD

SEQ ID NO: 24224 - protein, 19 aa, Artificial Sequence
  Description of Artificial Sequence: Synthetic peptide
  XENP020586 vhCDR2
EIRTKANNHATYYAESVKG

SEQ ID NO: 24225 - protein, 10 aa, Artificial Sequence
  Description of Artificial Sequence: Synthetic peptide
  XENP020586 vhCDR3
LANYDWYFDV

SEQ ID NO: 24226 - protein, 218 aa, Artificial Sequence; identical to SEQ ID NO: 22266
  Description of Artificial Sequence: Synthetic polypeptide
  XENP020586 7G8_H0.134_L0_IgG1_PVA_/S267K Light Chain

SEQ ID NO: 24227 - protein, 111 aa, Artificial Sequence; identical to SEQ ID NO: 22267
  Description of Artificial Sequence: Synthetic polypeptide
  VL of XENP020586

SEQ ID NO: 24228 - protein, 15 aa, Artificial Sequence
  Description of Artificial Sequence: Synthetic peptide
  XENP020586 vlCDR1
KASQSVDYDGDSYMN

SEQ ID NO: 24229 - protein, 7 aa, Artificial Sequence
  Description of Artificial Sequence: Synthetic peptide
  XENP020586 vlCDR2
AASNLES

SEQ ID NO: 24230 - protein, 9 aa, Artificial Sequence
  Description of Artificial Sequence: Synthetic peptide
  XENP020586 vlCDR3
QQSNEDPFT

SEQ ID NO: 24231 - protein, 450 aa, Artificial Sequence
  Description of Artificial Sequence: Synthetic polypeptide
  XENP020587 7G8_H0.135_L0_IgG1_PVA_/S267K Heavy Chain
EVKLEESGGGLVQPGGSMKLSCAASGFTFSDAWMDWVRQSPEKGLEWVAEIRTKANNHATYYAESVKGRFTISRDDSKSSVYLQMNSLRAEDTGIYYCTRLANIDWYFDVWGAGTTVTVSSASTKGPSVFPLAPSSKSTSGGTAALGCLVKDYFPEPVTVSWNSGALTSGVHTFPAVLQSSGLYSLSSVVTVPSSSLGTQTYICNVNHKPSDTKVDKKVEPKSCDKTHTCPPCPAPPVAGPSVFLFPPKPKDTLMISRTPEVTCVVVDVKHEDPEVKFNWYVDGVEVHNAKTKPREEEYNSTYRVVSVLTVLHQDWLNGKEYKCKVSNKALPAPIEKTISKAKGQPREPQVYTLPPSREEMTKNQVSLTCDVSGFYPSDIAVEWESDGQPENNYKTTPPVLDSDGSFFLYSKLTVDKSRWEQGDVFSCSVMHEALHNHYTQKSLSLSPGK

SEQ ID NO: 24232 - protein, 121 aa, Artificial Sequence
  Description of Artificial Sequence: Synthetic polypeptide
  VH of XENP020587
EVKLEESGGGLVQPGGSMKLSCAASGFTFSDAWMDWVRQSPEKGLEWVAEIRTKANNHATYYAESVKGRFTISRDDSKSSVYLQMNSLRAEDTGIYYCTRLANIDWYFDVWGAGTTVTVSS

SEQ ID NO: 24233 - protein, 5 aa, Artificial Sequence
  Description of Artificial Sequence: Synthetic peptide
  XENP020587 vhCDR1
DAWMD

SEQ ID NO: 24234 - protein, 19 aa, Artificial Sequence
  Description of Artificial Sequence: Synthetic peptide
  XENP020587 vhCDR2
EIRTKANNHATYYAESVKG

SEQ ID NO: 24235 - protein, 10 aa, Artificial Sequence
  Description of Artificial Sequence: Synthetic peptide
  XENP020587 vhCDR3
LANIDWYFDV

SEQ ID NO: 24236 - protein, 218 aa, Artificial Sequence; identical to SEQ ID NO: 22266
  Description of Artificial Sequence: Synthetic polypeptide
  XENP020587 7G8_H0.135_L0_IgG1_PVA_/S267K Light Chain

SEQ ID NO: 24237 - protein, 111 aa, Artificial Sequence; identical to SEQ ID NO: 22267
  Description of Artificial Sequence: Synthetic polypeptide
  VL of XENP020587

SEQ ID NO: 24238 - protein, 15 aa, Artificial Sequence
  Description of Artificial Sequence: Synthetic peptide
  XENP020587 vlCDR1
KASQSVDYDGDSYMN

SEQ ID NO: 24239 - protein, 7 aa, Artificial Sequence
  Description of Artificial Sequence: Synthetic peptide
  XENP020587 vlCDR2
AASNLES

SEQ ID NO: 24240 - protein, 9 aa, Artificial Sequence
  Description of Artificial Sequence: Synthetic peptide
  XENP020587 vlCDR3
QQSNEDPFT

SEQ ID NO: 24241 - protein, 450 aa, Artificial Sequence
  Description of Artificial Sequence: Synthetic polypeptide
  XENP020588 7G8_H0.136_L0_IgG1_PVA_/S267K Heavy Chain
EVKLEESGGGLVQPGGSMKLSCAASGFTFSDAWMDWVRQSPEKGLEWVAEIRTKANNHATYYAESVKGRFTISRDDSKSSVYLQMNSLRAEDTGIYYCTRLANHDWYFDVWGAGTTVTVSSASTKGPSVFPLAPSSKSTSGGTAALGCLVKDYFPEPVTVSWNSGALTSGVHTFPAVLQSSGLYSLSSVVTVPSSSLGTQTYICNVNHKPSDTKVDKKVEPKSCDKTHTCPPCPAPPVAGPSVFLFPPKPKDTLMISRTPEVTCVVVDVKHEDPEVKFNWYVDGVEVHNAKTKPREEEYNSTYRVVSVLTVLHQDWLNGKEYKCKVSNKALPAPIEKTISKAKGQPREPQVYTLPPSREEMTKNQVSLTCDVSGFYPSDIAVEWESDGQPENNYKTTPPVLDSDGSFFLYSKLTVDKSRWEQGDVFSCSVMHEALHNHYTQKSLSLSPGK

SEQ ID NO: 24242 - protein, 121 aa, Artificial Sequence
  Description of Artificial Sequence: Synthetic polypeptide
  VH of XENP020588
EVKLEESGGGLVQPGGSMKLSCAASGFTFSDAWMDWVRQSPEKGLEWVAEIRTKANNHATYYAESVKGRFTISRDDSKSSVYLQMNSLRAEDTGIYYCTRLANHDWYFDVWGAGTTVTVSS

SEQ ID NO: 24243 - protein, 5 aa, Artificial Sequence
  Description of Artificial Sequence: Synthetic peptide
  XENP020588 vhCDR1
DAWMD

SEQ ID NO: 24244 - protein, 19 aa, Artificial Sequence
  Description of Artificial Sequence: Synthetic peptide
  XENP020588 vhCDR2
EIRTKANNHATYYAESVKG

SEQ ID NO: 24245 - protein, 10 aa, Artificial Sequence
  Description of Artificial Sequence: Synthetic peptide
  XENP020588 vhCDR3
LANHDWYFDV

SEQ ID NO: 24246 - protein, 218 aa, Artificial Sequence; identical to SEQ ID NO: 22266
  Description of Artificial Sequence: Synthetic polypeptide
  XENP020588 7G8_H0.136_L0_IgG1_PVA_/S267K Light Chain

SEQ ID NO: 24247 - protein, 111 aa, Artificial Sequence; identical to SEQ ID NO: 22267
  Description of Artificial Sequence: Synthetic polypeptide
  VL of XENP020588

SEQ ID NO: 24248 - protein, 15 aa, Artificial Sequence
  Description of Artificial Sequence: Synthetic peptide
  XENP020588 vlCDR1
KASQSVDYDGDSYMN

SEQ ID NO: 24249 - protein, 7 aa, Artificial Sequence
  Description of Artificial Sequence: Synthetic peptide
  XENP020588 vlCDR2
AASNLES

SEQ ID NO: 24250 - protein, 9 aa, Artificial Sequence
  Description of Artificial Sequence: Synthetic peptide
  XENP020588 vlCDR3
QQSNEDPFT

SEQ ID NO: 24251 - protein, 450 aa, Artificial Sequence
  Description of Artificial Sequence: Synthetic polypeptide
  XENP020589 7G8_H0.137_L0_IgG1_PVA_/S267K Heavy Chain
EVKLEESGGGLVQPGGSMKLSCAASGFTFSDAWMDWVRQSPEKGLEWVAEIRTKANNHATYYAESVKGRFTISRDDSKSSVYLQMNSLRAEDTGIYYCTRLANQDWYFDVWGAGTTVTVSSASTKGPSVFPLAPSSKSTSGGTAALGCLVKDYFPEPVTVSWNSGALTSGVHTFPAVLQSSGLYSLSSVVTVPSSSLGTQTYICNVNHKPSDTKVDKKVEPKSCDKTHTCPPCPAPPVAGPSVFLFPPKPKDTLMISRTPEVTCVVVDVKHEDPEVKFNWYVDGVEVHNAKTKPREEEYNSTYRVVSVLTVLHQDWLNGKEYKCKVSNKALPAPIEKTISKAKGQPREPQVYTLPPSREEMTKNQVSLTCDVSGFYPSDIAVEWESDGQPENNYKTTPPVLDSDGSFFLYSKLTVDKSRWEQGDVFSCSVMHEALHNHYTQKSLSLSPGK

SEQ ID NO: 24252 - protein, 121 aa, Artificial Sequence
  Description of Artificial Sequence: Synthetic polypeptide
  VH of XENP020589
EVKLEESGGGLVQPGGSMKLSCAASGFTFSDAWMDWVRQSPEKGLEWVAEIRTKANNHATYYAESVKGRFTISRDDSKSSVYLQMNSLRAEDTGIYYCTRLANQDWYFDVWGAGTTVTVSS

SEQ ID NO: 24253 - protein, 5 aa, Artificial Sequence
  Description of Artificial Sequence: Synthetic peptide
  XENP020589 vhCDR1
DAWMD

SEQ ID NO: 24254 - protein, 19 aa, Artificial Sequence
  Description of Artificial Sequence: Synthetic peptide
  XENP020589 vhCDR2
EIRTKANNHATYYAESVKG

SEQ ID NO: 24255 - protein, 10 aa, Artificial Sequence
  Description of Artificial Sequence: Synthetic peptide
  XENP020589 vhCDR3
LANQDWYFDV

SEQ ID NO: 24256 - protein, 218 aa, Artificial Sequence; identical to SEQ ID NO: 22266
  Description of Artificial Sequence: Synthetic polypeptide
  XENP020589 7G8_H0.137_L0_IgG1_PVA_/S267K Light Chain

SEQ ID NO: 24257 - protein, 111 aa, Artificial Sequence; identical to SEQ ID NO: 22267
  Description of Artificial Sequence: Synthetic polypeptide
  VL of XENP020589

SEQ ID NO: 24258 - protein, 15 aa, Artificial Sequence
  Description of Artificial Sequence: Synthetic peptide
  XENP020589 vlCDR1
KASQSVDYDGDSYMN

SEQ ID NO: 24259 - protein, 7 aa, Artificial Sequence
  Description of Artificial Sequence: Synthetic peptide
  XENP020589 vlCDR2
AASNLES

SEQ ID NO: 24260 - protein, 9 aa, Artificial Sequence
  Description of Artificial Sequence: Synthetic peptide
  XENP020589 vlCDR3
QQSNEDPFT

SEQ ID NO: 24261 - protein, 450 aa, Artificial Sequence
  Description of Artificial Sequence: Synthetic polypeptide
  XENP020590 7G8_H0.138_L0_IgG1_PVA_/S267K Heavy Chain
EVKLEESGGGLVQPGGSMKLSCAASGFTFSDAWMDWVRQSPEKGLEWVAEIRTKANNHATYYAESVKGRFTISRDDSKSSVYLQMNSLRAEDTGIYYCTRLANSDWYFDVWGAGTTVTVSSASTKGPSVFPLAPSSKSTSGGTAALGCLVKDYFPEPVTVSWNSGALTSGVHTFPAVLQSSGLYSLSSVVTVPSSSLGTQTYICNVNHKPSDTKVDKKVEPKSCDKTHTCPPCPAPPVAGPSVFLFPPKPKDTLMISRTPEVTCVVVDVKHEDPEVKFNWYVDGVEVHNAKTKPREEEYNSTYRVVSVLTVLHQDWLNGKEYKCKVSNKALPAPIEKTISKAKGQPREPQVYTLPPSREEMTKNQVSLTCDVSGFYPSDIAVEWESDGQPENNYKTTPPVLDSDGSFFLYSKLTVDKSRWEQGDVFSCSVMHEALHNHYTQKSLSLSPGK

SEQ ID NO: 24262 - protein, 121 aa, Artificial Sequence
  Description of Artificial Sequence: Synthetic polypeptide
  VH of XENP020590
EVKLEESGGGLVQPGGSMKLSCAASGFTFSDAWMDWVRQSPEKGLEWVAEIRTKANNHATYYAESVKGRFTISRDDSKSSVYLQMNSLRAEDTGIYYCTRLANSDWYFDVWGAGTTVTVSS

SEQ ID NO: 24263 - protein, 5 aa, Artificial Sequence
  Description of Artificial Sequence: Synthetic peptide
  XENP020590 vhCDR1
DAWMD

SEQ ID NO: 24264 - protein, 19 aa, Artificial Sequence
  Description of Artificial Sequence: Synthetic peptide
  XENP020590 vhCDR2
EIRTKANNHATYYAESVKG

SEQ ID NO: 24265 - protein, 10 aa, Artificial Sequence
  Description of Artificial Sequence: Synthetic peptide
  XENP020590 vhCDR3
LANSDWYFDV

SEQ ID NO: 24266 - protein, 218 aa, Artificial Sequence; identical to SEQ ID NO: 22266
  Description of Artificial Sequence: Synthetic polypeptide
  XENP020590 7G8_H0.138_L0_IgG1_PVA_/S267K Light Chain

SEQ ID NO: 24267 - protein, 111 aa, Artificial Sequence; identical to SEQ ID NO: 22267
  Description of Artificial Sequence: Synthetic polypeptide
  VL of XENP020590

SEQ ID NO: 24268 - protein, 15 aa, Artificial Sequence
  Description of Artificial Sequence: Synthetic peptide
  XENP020590 vlCDR1
KASQSVDYDGDSYMN

SEQ ID NO: 24269 - protein, 7 aa, Artificial Sequence
  Description of Artificial Sequence: Synthetic peptide
  XENP020590 vlCDR2
AASNLES

SEQ ID NO: 24270 - protein, 9 aa, Artificial Sequence
  Description of Artificial Sequence: Synthetic peptide
  XENP020590 vlCDR3
QQSNEDPFT

SEQ ID NO: 24271 - protein, 450 aa, Artificial Sequence
  Description of Artificial Sequence: Synthetic polypeptide
  XENP020591 7G8_H0.139_L0_IgG1_PVA_/S267K Heavy Chain
EVKLEESGGGLVQPGGSMKLSCAASGFTFSDAWMDWVRQSPEKGLEWVAEIRTKANNHATYYAESVKGRFTISRDDSKSSVYLQMNSLRAEDTGIYYCTRLANDDWYFDVWGAGTTVTVSSASTKGPSVFPLAPSSKSTSGGTAALGCLVKDYFPEPVTVSWNSGALTSGVHTFPAVLQSSGLYSLSSVVTVPSSSLGTQTYICNVNHKPSDTKVDKKVEPKSCDKTHTCPPCPAPPVAGPSVFLFPPKPKDTLMISRTPEVTCVVVDVKHEDPEVKFNWYVDGVEVHNAKTKPREEEYNSTYRVVSVLTVLHQDWLNGKEYKCKVSNKALPAPIEKTISKAKGQPREPQVYTLPPSREEMTKNQVSLTCDVSGFYPSDIAVEWESDGQPENNYKTTPPVLDSDGSFFLYSKLTVDKSRWEQGDVFSCSVMHEALHNHYTQKSLSLSPGK

SEQ ID NO: 24272 - protein, 121 aa, Artificial Sequence
  Description of Artificial Sequence: Synthetic polypeptide
  VH of XENP020591
EVKLEESGGGLVQPGGSMKLSCAASGFTFSDAWMDWVRQSPEKGLEWVAEIRTKANNHATYYAESVKGRFTISRDDSKSSVYLQMNSLRAEDTGIYYCTRLANDDWYFDVWGAGTTVTVSS

SEQ ID NO: 24273 - protein, 5 aa, Artificial Sequence
  Description of Artificial Sequence: Synthetic peptide
  XENP020591 vhCDR1
DAWMD

SEQ ID NO: 24274 - protein, 19 aa, Artificial Sequence
  Description of Artificial Sequence: Synthetic peptide
  XENP020591 vhCDR2
EIRTKANNHATYYAESVKG

SEQ ID NO: 24275 - protein, 10 aa, Artificial Sequence
  Description of Artificial Sequence: Synthetic peptide
  XENP020591 vhCDR3
LANDDWYFDV

SEQ ID NO: 24276 - protein, 218 aa, Artificial Sequence; identical to SEQ ID NO: 22266
  Description of Artificial Sequence: Synthetic polypeptide
  XENP020591 7G8_H0.139_L0_IgG1_PVA_/S267K Light Chain

SEQ ID NO: 24277 - protein, 111 aa, Artificial Sequence; identical to SEQ ID NO: 22267
  Description of Artificial Sequence: Synthetic polypeptide
  VL of XENP020591

SEQ ID NO: 24278 - protein, 15 aa, Artificial Sequence
  Description of Artificial Sequence: Synthetic peptide
  XENP020591 vlCDR1
KASQSVDYDGDSYMN

SEQ ID NO: 24279 - protein, 7 aa, Artificial Sequence
  Description of Artificial Sequence: Synthetic peptide
  XENP020591 vlCDR2
AASNLES

SEQ ID NO: 24280 - protein, 9 aa, Artificial Sequence
  Description of Artificial Sequence: Synthetic peptide
  XENP020591 vlCDR3
QQSNEDPFT

SEQ ID NO: 24281 - protein, 450 aa, Artificial Sequence
  Description of Artificial Sequence: Synthetic polypeptide
  XENP020592 7G8_H0.140_L0_IgG1_PVA_/S267K Heavy Chain
EVKLEESGGGLVQPGGSMKLSCAASGFTFSDAWMDWVRQSPEKGLEWVAEIRTKANNHATYYAESVKGRFTISRDDSKSSVYLQMNSLRAEDTGIYYCTRLANRDWYFDVWGAGTTVTVSSASTKGPSVFPLAPSSKSTSGGTAALGCLVKDYFPEPVTVSWNSGALTSGVHTFPAVLQSSGLYSLSSVVTVPSSSLGTQTYICNVNHKPSDTKVDKKVEPKSCDKTHTCPPCPAPPVAGPSVFLFPPKPKDTLMISRTPEVTCVVVDVKHEDPEVKFNWYVDGVEVHNAKTKPREEEYNSTYRVVSVLTVLHQDWLNGKEYKCKVSNKALPAPIEKTISKAKGQPREPQVYTLPPSREEMTKNQVSLTCDVSGFYPSDIAVEWESDGQPENNYKTTPPVLDSDGSFFLYSKLTVDKSRWEQGDVFSCSVMHEALHNHYTQKSLSLSPGK

SEQ ID NO: 24282 - protein, 121 aa, Artificial Sequence
  Description of Artificial Sequence: Synthetic polypeptide
  VH of XENP020592
EVKLEESGGGLVQPGGSMKLSCAASGFTFSDAWMDWVRQSPEKGLEWVAEIRTKANNHATYYAESVKGRFTISRDDSKSSVYLQMNSLRAEDTGIYYCTRLANRDWYFDVWGAGTTVTVSS

SEQ ID NO: 24283 - protein, 5 aa, Artificial Sequence
  Description of Artificial Sequence: Synthetic peptide
  XENP020592 vhCDR1
DAWMD

SEQ ID NO: 24284 - protein, 19 aa, Artificial Sequence
  Description of Artificial Sequence: Synthetic peptide
  XENP020592 vhCDR2
EIRTKANNHATYYAESVKG

SEQ ID NO: 24285 - protein, 10 aa, Artificial Sequence
  Description of Artificial Sequence: Synthetic peptide
  XENP020592 vhCDR3
LANRDWYFDV

SEQ ID NO: 24286 - protein, 218 aa, Artificial Sequence; identical to SEQ ID NO: 22266
  Description of Artificial Sequence: Synthetic polypeptide
  XENP020592 7G8_H0.140_L0_IgG1_PVA_/S267K Light Chain

SEQ ID NO: 24287 - protein, 111 aa, Artificial Sequence; identical to SEQ ID NO: 22267
  Description of Artificial Sequence: Synthetic polypeptide
  VL of XENP020592

SEQ ID NO: 24288 - protein, 15 aa, Artificial Sequence
  Description of Artificial Sequence: Synthetic peptide
  XENP020592 vlCDR1
KASQSVDYDGDSYMN

SEQ ID NO: 24289 - protein, 7 aa, Artificial Sequence
  Description of Artificial Sequence: Synthetic peptide
  XENP020592 vlCDR2
AASNLES

SEQ ID NO: 24290 - protein, 9 aa, Artificial Sequence
  Description of Artificial Sequence: Synthetic peptide
  XENP020592 vlCDR3
QQSNEDPFT

SEQ ID NO: 24291 - protein, 450 aa, Artificial Sequence
  Description of Artificial Sequence: Synthetic polypeptide
  XENP020593 7G8_H0.141_L0_IgG1_PVA_/S267K Heavy Chain
EVKLEESGGGLVQPGGSMKLSCAASGFTFSDAWMDWVRQSPEKGLEWVAEIRTKANNHATYYAESVKGRFTISRDDSKSSVYLQMNSLRAEDTGIYYCTRLANWNWYFDVWGAGTTVTVSSASTKGPSVFPLAPSSKSTSGGTAALGCLVKDYFPEPVTVSWNSGALTSGVHTFPAVLQSSGLYSLSSVVTVPSSSLGTQTYICNVNHKPSDTKVDKKVEPKSCDKTHTCPPCPAPPVAGPSVFLFPPKPKDTLMISRTPEVTCVVVDVKHEDPEVKFNWYVDGVEVHNAKTKPREEEYNSTYRVVSVLTVLHQDWLNGKEYKCKVSNKALPAPIEKTISKAKGQPREPQVYTLPPSREEMTKNQVSLTCDVSGFYPSDIAVEWESDGQPENNYKTTPPVLDSDGSFFLYSKLTVDKSRWEQGDVFSCSVMHEALHNHYTQKSLSLSPGK

SEQ ID NO: 24292 - protein, 121 aa, Artificial Sequence
  Description of Artificial Sequence: Synthetic polypeptide
  VH of XENP020593
EVKLEESGGGLVQPGGSMKLSCAASGFTFSDAWMDWVRQSPEKGLEWVAEIRTKANNHATYYAESVKGRFTISRDDSKSSVYLQMNSLRAEDTGIYYCTRLANWNWYFDVWGAGTTVTVSS

SEQ ID NO: 24293 - protein, 5 aa, Artificial Sequence
  Description of Artificial Sequence: Synthetic peptide
  XENP020593 vhCDR1
DAWMD

SEQ ID NO: 24294 - protein, 19 aa, Artificial Sequence
  Description of Artificial Sequence: Synthetic peptide
  XENP020593 vhCDR2
EIRTKANNHATYYAESVKG

SEQ ID NO: 24295 - protein, 10 aa, Artificial Sequence
  Description of Artificial Sequence: Synthetic peptide
  XENP020593 vhCDR3
LANWNWYFDV

SEQ ID NO: 24296 - protein, 218 aa, Artificial Sequence; identical to SEQ ID NO: 22266
  Description of Artificial Sequence: Synthetic polypeptide
  XENP020593 7G8_H0.141_L0_IgG1_PVA_/S267K Light Chain

SEQ ID NO: 24297 - protein, 111 aa, Artificial Sequence; identical to SEQ ID NO: 22267
  Description of Artificial Sequence: Synthetic polypeptide
  VL of XENP020593

SEQ ID NO: 24298 - protein, 15 aa, Artificial Sequence
  Description of Artificial Sequence: Synthetic peptide
  XENP020593 vlCDR1
KASQSVDYDGDSYMN

SEQ ID NO: 24299 - protein, 7 aa, Artificial Sequence
  Description of Artificial Sequence: Synthetic peptide
  XENP020593 vlCDR2
AASNLES

SEQ ID NO: 24300 - protein, 9 aa, Artificial Sequence
  Description of Artificial Sequence: Synthetic peptide
  XENP020593 vlCDR3
QQSNEDPFT

SEQ ID NO: 24301 - protein, 450 aa, Artificial Sequence
  Description of Artificial Sequence: Synthetic polypeptide
  XENP020594 7G8_H0.142_L0_IgG1_PVA_/S267K Heavy Chain
EVKLEESGGGLVQPGGSMKLSCAASGFTFSDAWMDWVRQSPEKGLEWVAEIRTKANNHATYYAESVKGRFTISRDDSKSSVYLQMNSLRAEDTGIYYCTRLANWEWYFDVWGAGTTVTVSSASTKGPSVFPLAPSSKSTSGGTAALGCLVKDYFPEPVTVSWNSGALTSGVHTFPAVLQSSGLYSLSSVVTVPSSSLGTQTYICNVNHKPSDTKVDKKVEPKSCDKTHTCPPCPAPPVAGPSVFLFPPKPKDTLMISRTPEVTCVVVDVKHEDPEVKFNWYVDGVEVHNAKTKPREEEYNSTYRVVSVLTVLHQDWLNGKEYKCKVSNKALPAPIEKTISKAKGQPREPQVYTLPPSREEMTKNQVSLTCDVSGFYPSDIAVEWESDGQPENNYKTTPPVLDSDGSFFLYSKLTVDKSRWEQGDVFSCSVMHEALHNHYTQKSLSLSPGK

SEQ ID NO: 24302 - protein, 121 aa, Artificial Sequence
  Description of Artificial Sequence: Synthetic polypeptide
  VH of XENP020594
EVKLEESGGGLVQPGGSMKLSCAASGFTFSDAWMDWVRQSPEKGLEWVAEIRTKANNHATYYAESVKGRFTISRDDSKSSVYLQMNSLRAEDTGIYYCTRLANWEWYFDVWGAGTTVTVSS

SEQ ID NO: 24303 - protein, 5 aa, Artificial Sequence
  Description of Artificial Sequence: Synthetic peptide
  XENP020594 vhCDR1
DAWMD

SEQ ID NO: 24304 - protein, 19 aa, Artificial Sequence
  Description of Artificial Sequence: Synthetic peptide
  XENP020594 vhCDR2
EIRTKANNHATYYAESVKG

SEQ ID NO: 24305 - protein, 10 aa, Artificial Sequence
  Description of Artificial Sequence: Synthetic peptide
  XENP020594 vhCDR3
LANWEWYFDV

SEQ ID NO: 24306 - protein, 218 aa, Artificial Sequence; identical to SEQ ID NO: 22266
  Description of Artificial Sequence: Synthetic polypeptide
  XENP020594 7G8_H0.142_L0_IgG1_PVA_/S267K Light Chain

SEQ ID NO: 24307 - protein, 111 aa, Artificial Sequence; identical to SEQ ID NO: 22267
  Description of Artificial Sequence: Synthetic polypeptide
  VL of XENP020594

SEQ ID NO: 24308 - protein, 15 aa, Artificial Sequence
  Description of Artificial Sequence: Synthetic peptide
  XENP020594 vlCDR1
KASQSVDYDGDSYMN

SEQ ID NO: 24309 - protein, 7 aa, Artificial Sequence
  Description of Artificial Sequence: Synthetic peptide
  XENP020594 vlCDR2
AASNLES

SEQ ID NO: 24310 - protein, 9 aa, Artificial Sequence
  Description of Artificial Sequence: Synthetic peptide
  XENP020594 vlCDR3
QQSNEDPFT

SEQ ID NO: 24311 - protein, 450 aa, Artificial Sequence
  Description of Artificial Sequence: Synthetic polypeptide
  XENP020595 7G8_H0.143_L0_IgG1_PVA_/S267K Heavy Chain
EVKLEESGGGLVQPGGSMKLSCAASGFTFSDAWMDWVRQSPEKGLEWVAEIRTKANNHATYYAESVKGRFTISRDDSKSSVYLQMNSLRAEDTGIYYCTRLANWHWYFDVWGAGTTVTVSSASTKGPSVFPLAPSSKSTSGGTAALGCLVKDYFPEPVTVSWNSGALTSGVHTFPAVLQSSGLYSLSSVVTVPSSSLGTQTYICNVNHKPSDTKVDKKVEPKSCDKTHTCPPCPAPPVAGPSVFLFPPKPKDTLMISRTPEVTCVVVDVKHEDPEVKFNWYVDGVEVHNAKTKPREEEYNSTYRVVSVLTVLHQDWLNGKEYKCKVSNKALPAPIEKTISKAKGQPREPQVYTLPPSREEMTKNQVSLTCDVSGFYPSDIAVEWESDGQPENNYKTTPPVLDSDGSFFLYSKLTVDKSRWEQGDVFSCSVMHEALHNHYTQKSLSLSPGK

SEQ ID NO: 24312 - protein, 121 aa, Artificial Sequence
  Description of Artificial Sequence: Synthetic polypeptide
  VH of XENP020595
EVKLEESGGGLVQPGGSMKLSCAASGFTFSDAWMDWVRQSPEKGLEWVAEIRTKANNHATYYAESVKGRFTISRDDSKSSVYLQMNSLRAEDTGIYYCTRLANWHWYFDVWGAGTTVTVSS

SEQ ID NO: 24313 - protein, 5 aa, Artificial Sequence
  Description of Artificial Sequence: Synthetic peptide
  XENP020595 vhCDR1
DAWMD

SEQ ID NO: 24314 - protein, 19 aa, Artificial Sequence
  Description of Artificial Sequence: Synthetic peptide
  XENP020595 vhCDR2
EIRTKANNHATYYAESVKG

SEQ ID NO: 24315 - protein, 10 aa, Artificial Sequence
  Description of Artificial Sequence: Synthetic peptide
  XENP020595 vhCDR3
LANWHWYFDV

SEQ ID NO: 24316 - protein, 218 aa, Artificial Sequence; identical to SEQ ID NO: 22266
  Description of Artificial Sequence: Synthetic polypeptide
  XENP020595 7G8_H0.143_L0_IgG1_PVA_/S267K Light Chain

SEQ ID NO: 24317 - protein, 111 aa, Artificial Sequence; identical to SEQ ID NO: 22267
  Description of Artificial Sequence: Synthetic polypeptide
  VL of XENP020595

SEQ ID NO: 24318 - protein, 15 aa, Artificial Sequence
  Description of Artificial Sequence: Synthetic peptide
  XENP020595 vlCDR1
KASQSVDYDGDSYMN

SEQ ID NO: 24319 - protein, 7 aa, Artificial Sequence
  Description of Artificial Sequence: Synthetic peptide
  XENP020595 vlCDR2
AASNLES

SEQ ID NO: 24320 - protein, 9 aa, Artificial Sequence
  Description of Artificial Sequence: Synthetic peptide
  XENP020595 vlCDR3
QQSNEDPFT

SEQ ID NO: 24321 - protein, 450 aa, Artificial Sequence
  Description of Artificial Sequence: Synthetic polypeptide
  XENP020596 7G8_H0.144_L0_IgG1_PVA_/S267K Heavy Chain
EVKLEESGGGLVQPGGSMKLSCAASGFTFSDAWMDWVRQSPEKGLEWVAEIRTKANNHATYYAESVKGRFTISRDDSKSSVYLQMNSLRAEDTGIYYCTRLANWRWYFDVWGAGTTVTVSSASTKGPSVFPLAPSSKSTSGGTAALGCLVKDYFPEPVTVSWNSGALTSGVHTFPAVLQSSGLYSLSSVVTVPSSSLGTQTYICNVNHKPSDTKVDKKVEPKSCDKTHTCPPCPAPPVAGPSVFLFPPKPKDTLMISRTPEVTCVVVDVKHEDPEVKFNWYVDGVEVHNAKTKPREEEYNSTYRVVSVLTVLHQDWLNGKEYKCKVSNKALPAPIEKTISKAKGQPREPQVYTLPPSREEMTKNQVSLTCDVSGFYPSDIAVEWESDGQPENNYKTTPPVLDSDGSFFLYSKLTVDKSRWEQGDVFSCSVMHEALHNHYTQKSLSLSPGK

SEQ ID NO: 24322 - protein, 121 aa, Artificial Sequence
  Description of Artificial Sequence: Synthetic polypeptide
  VH of XENP020596
EVKLEESGGGLVQPGGSMKLSCAASGFTFSDAWMDWVRQSPEKGLEWVAEIRTKANNHATYYAESVKGRFTISRDDSKSSVYLQMNSLRAEDTGIYYCTRLANWRWYFDVWGAGTTVTVSS

SEQ ID NO: 24323 - protein, 5 aa, Artificial Sequence
  Description of Artificial Sequence: Synthetic peptide
  XENP020596 vhCDR1
DAWMD

SEQ ID NO: 24324 - protein, 19 aa, Artificial Sequence
  Description of Artificial Sequence: Synthetic peptide
  XENP020596 vhCDR2
EIRTKANNHATYYAESVKG

SEQ ID NO: 24325 - protein, 10 aa, Artificial Sequence
  Description of Artificial Sequence: Synthetic peptide
  XENP020596 vhCDR3
LANWRWYFDV

SEQ ID NO: 24326 - protein, 218 aa, Artificial Sequence; identical to SEQ ID NO: 22266
  Description of Artificial Sequence: Synthetic polypeptide
  XENP020596 7G8_H0.144_L0_IgG1_PVA_/S267K Light Chain

SEQ ID NO: 24327 - protein, 111 aa, Artificial Sequence; identical to SEQ ID NO: 22267
  Description of Artificial Sequence: Synthetic polypeptide
  VL of XENP020596

SEQ ID NO: 24328 - protein, 15 aa, Artificial Sequence
  Description of Artificial Sequence: Synthetic peptide
  XENP020596 vlCDR1
KASQSVDYDGDSYMN

SEQ ID NO: 24329 - protein, 7 aa, Artificial Sequence
  Description of Artificial Sequence: Synthetic peptide
  XENP020596 vlCDR2
AASNLES

SEQ ID NO: 24330 - protein, 9 aa, Artificial Sequence
  Description of Artificial Sequence: Synthetic peptide
  XENP020596 vlCDR3
QQSNEDPFT

SEQ ID NO: 24331 - protein, 450 aa, Artificial Sequence
  Description of Artificial Sequence: Synthetic polypeptide
  XENP020601 7G8_H0.145_L0_IgG1_PVA_/S267K Heavy Chain
EVKLEESGGGLVQPGGSMKLSCAASGFTFSDAWMDWVRQSPEKGLEWVAEIRTKANNHATYYAESVKGRFTISRDDSKSSVYLQMNSLRAEDTGIYYCTRLANWLWYFDVWGAGTTVTVSSASTKGPSVFPLAPSSKSTSGGTAALGCLVKDYFPEPVTVSWNSGALTSGVHTFPAVLQSSGLYSLSSVVTVPSSSLGTQTYICNVNHKPSDTKVDKKVEPKSCDKTHTCPPCPAPPVAGPSVFLFPPKPKDTLMISRTPEVTCVVVDVKHEDPEVKFNWYVDGVEVHNAKTKPREEEYNSTYRVVSVLTVLHQDWLNGKEYKCKVSNKALPAPIEKTISKAKGQPREPQVYTLPPSREEMTKNQVSLTCDVSGFYPSDIAVEWESDGQPENNYKTTPPVLDSDGSFFLYSKLTVDKSRWEQGDVFSCSVMHEALHNHYTQKSLSLSPGK

SEQ ID NO: 24332 - protein, 121 aa, Artificial Sequence
  Description of Artificial Sequence: Synthetic polypeptide
  VH of XENP020601
EVKLEESGGGLVQPGGSMKLSCAASGFTFSDAWMDWVRQSPEKGLEWVAEIRTKANNHATYYAESVKGRFTISRDDSKSSVYLQMNSLRAEDTGIYYCTRLANWLWYFDVWGAGTTVTVSS

SEQ ID NO: 24333 - protein, 5 aa, Artificial Sequence
  Description of Artificial Sequence: Synthetic peptide
  XENP020601 vhCDR1
DAWMD

SEQ ID NO: 24334 - protein, 19 aa, Artificial Sequence
  Description of Artificial Sequence: Synthetic peptide
  XENP020601 vhCDR2
EIRTKANNHATYYAESVKG

SEQ ID NO: 24335 - protein, 10 aa, Artificial Sequence
  Description of Artificial Sequence: Synthetic peptide
  XENP020601 vhCDR3
LANWLWYFDV

SEQ ID NO: 24336 - protein, 218 aa, Artificial Sequence; identical to SEQ ID NO: 22266
  Description of Artificial Sequence: Synthetic polypeptide
  XENP020601 7G8_H0.145_L0_IgG1_PVA_/S267K Light Chain

SEQ ID NO: 24337 - protein, 111 aa, Artificial Sequence; identical to SEQ ID NO: 22267
  Description of Artificial Sequence: Synthetic polypeptide
  VL of XENP020601

SEQ ID NO: 24338 - protein, 15 aa, Artificial Sequence
  Description of Artificial Sequence: Synthetic peptide
  XENP020601 vlCDR1
KASQSVDYDGDSYMN

SEQ ID NO: 24339 - protein, 7 aa, Artificial Sequence
  Description of Artificial Sequence: Synthetic peptide
  XENP020601 vlCDR2
AASNLES

SEQ ID NO: 24340 - protein, 9 aa, Artificial Sequence
  Description of Artificial Sequence: Synthetic peptide
  XENP020601 vlCDR3
QQSNEDPFT

SEQ ID NO: 24341 - protein, 450 aa, Artificial Sequence
  Description of Artificial Sequence: Synthetic polypeptide
  XENP020602 7G8_H0.146_L0_IgG1_PVA_/S267K Heavy Chain
EVKLEESGGGLVQPGGSMKLSCAASGFTFSDAWMDWVRQSPEKGLEWVAEIRTKANNHATYYAESVKGRFTISRDDSKSSVYLQMNSLRAEDTGIYYCTRLANWGWYFDVWGAGTTVTVSSASTKGPSVFPLAPSSKSTSGGTAALGCLVKDYFPEPVTVSWNSGALTSGVHTFPAVLQSSGLYSLSSVVTVPSSSLGTQTYICNVNHKPSDTKVDKKVEPKSCDKTHTCPPCPAPPVAGPSVFLFPPKPKDTLMISRTPEVTCVVVDVKHEDPEVKFNWYVDGVEVHNAKTKPREEEYNSTYRVVSVLTVLHQDWLNGKEYKCKVSNKALPAPIEKTISKAKGQPREPQVYTLPPSREEMTKNQVSLTCDVSGFYPSDIAVEWESDGQPENNYKTTPPVLDSDGSFFLYSKLTVDKSRWEQGDVFSCSVMHEALHNHYTQKSLSLSPGK

SEQ ID NO: 24342 - protein, 121 aa, Artificial Sequence
  Description of Artificial Sequence: Synthetic polypeptide
  VH of XENP020602
EVKLEESGGGLVQPGGSMKLSCAASGFTFSDAWMDWVRQSPEKGLEWVAEIRTKANNHATYYAESVKGRFTISRDDSKSSVYLQMNSLRAEDTGIYYCTRLANWGWYFDVWGAGTTVTVSS

SEQ ID NO: 24343 - protein, 5 aa, Artificial Sequence
  Description of Artificial Sequence: Synthetic peptide
  XENP020602 vhCDR1
DAWMD

SEQ ID NO: 24344 - protein, 19 aa, Artificial Sequence
  Description of Artificial Sequence: Synthetic peptide
  XENP020602 vhCDR2
EIRTKANNHATYYAESVKG

SEQ ID NO: 24345 - protein, 10 aa, Artificial Sequence
  Description of Artificial Sequence: Synthetic peptide
  XENP020602 vhCDR3
LANWGWYFDV

SEQ ID NO: 24346 - protein, 218 aa, Artificial Sequence; identical to SEQ ID NO: 22266
  Description of Artificial Sequence: Synthetic polypeptide
  XENP020602 7G8_H0.146_L0_IgG1_PVA_/S267K Light Chain

SEQ ID NO: 24347 - protein, 111 aa, Artificial Sequence; identical to SEQ ID NO: 22267
  Description of Artificial Sequence: Synthetic polypeptide
  VL of XENP020602

SEQ ID NO: 24348 - protein, 15 aa, Artificial Sequence
  Description of Artificial Sequence: Synthetic peptide
  XENP020602 vlCDR1
KASQSVDYDGDSYMN

SEQ ID NO: 24349 - protein, 7 aa, Artificial Sequence
  Description of Artificial Sequence: Synthetic peptide
  XENP020602 vlCDR2
AASNLES

SEQ ID NO: 24350 - protein, 9 aa, Artificial Sequence
  Description of Artificial Sequence: Synthetic peptide
  XENP020602 vlCDR3
QQSNEDPFT

SEQ ID NO: 24351 - protein, 450 aa, Artificial Sequence
  Description of Artificial Sequence: Synthetic polypeptide
  XENP020603 7G8_H0.147_L0_IgG1_PVA_/S267K Heavy Chain
EVKLEESGGGLVQPGGSMKLSCAASGFTFSDAWMDWVRQSPEKGLEWVAEIRTKANNHATYYAESVKGRFTISRDDSKSSVYLQMNSLRAEDTGIYYCTRLANWYWYFDVWGAGTTVTVSSASTKGPSVFPLAPSSKSTSGGTAALGCLVKDYFPEPVTVSWNSGALTSGVHTFPAVLQSSGLYSLSSVVTVPSSSLGTQTYICNVNHKPSDTKVDKKVEPKSCDKTHTCPPCPAPPVAGPSVFLFPPKPKDTLMISRTPEVTCVVVDVKHEDPEVKFNWYVDGVEVHNAKTKPREEEYNSTYRVVSVLTVLHQDWLNGKEYKCKVSNKALPAPIEKTISKAKGQPREPQVYTLPPSREEMTKNQVSLTCDVSGFYPSDIAVEWESDGQPENNYKTTPPVLDSDGSFFLYSKLTVDKSRWEQGDVFSCSVMHEALHNHYTQKSLSLSPGK

SEQ ID NO: 24352 - protein, 121 aa, Artificial Sequence
  Description of Artificial Sequence: Synthetic polypeptide
  VH of XENP020603
EVKLEESGGGLVQPGGSMKLSCAASGFTFSDAWMDWVRQSPEKGLEWVAEIRTKANNHATYYAESVKGRFTISRDDSKSSVYLQMNSLRAEDTGIYYCTRLANWYWYFDVWGAGTTVTVSS

SEQ ID NO: 24353 - protein, 5 aa, Artificial Sequence
  Description of Artificial Sequence: Synthetic peptide
  XENP020603 vhCDR1
DAWMD

SEQ ID NO: 24354 - protein, 19 aa, Artificial Sequence
  Description of Artificial Sequence: Synthetic peptide
  XENP020603 vhCDR2
EIRTKANNHATYYAESVKG

SEQ ID NO: 24355 - protein, 10 aa, Artificial Sequence
  Description of Artificial Sequence: Synthetic peptide
  XENP020603 vhCDR3
LANWYWYFDV

SEQ ID NO: 24356 - protein, 218 aa, Artificial Sequence; identical to SEQ ID NO: 22266
  Description of Artificial Sequence: Synthetic polypeptide
  XENP020603 7G8_H0.147_L0_IgG1_PVA_/S267K Light Chain

SEQ ID NO: 24357 - protein, 111 aa, Artificial Sequence; identical to SEQ ID NO: 22267
  Description of Artificial Sequence: Synthetic polypeptide
  VL of XENP020603

SEQ ID NO: 24358 - protein, 15 aa, Artificial Sequence
  Description of Artificial Sequence: Synthetic peptide
  XENP020603 vlCDR1
KASQSVDYDGDSYMN

SEQ ID NO: 24359 - protein, 7 aa, Artificial Sequence
  Description of Artificial Sequence: Synthetic peptide
  XENP020603 vlCDR2
AASNLES

SEQ ID NO: 24360 - protein, 9 aa, Artificial Sequence
  Description of Artificial Sequence: Synthetic peptide
  XENP020603 vlCDR3
QQSNEDPFT

SEQ ID NO: 24361 - protein, 450 aa, Artificial Sequence
  Description of Artificial Sequence: Synthetic polypeptide
  XENP020604 7G8_H0.148_L0_IgG1_PVA_/S267K Heavy Chain
EVKLEESGGGLVQPGGSMKLSCAASGFTFSDAWMDWVRQSPEKGLEWVAEIRTKANNHATYYAESVKGRFTISRDDSKSSVYLQMNSLRAEDTGIYYCTRLANWDYYFDVWGAGTTVTVSSASTKGPSVFPLAPSSKSTSGGTAALGCLVKDYFPEPVTVSWNSGALTSGVHTFPAVLQSSGLYSLSSVVTVPSSSLGTQTYICNVNHKPSDTKVDKKVEPKSCDKTHTCPPCPAPPVAGPSVFLFPPKPKDTLMISRTPEVTCVVVDVKHEDPEVKFNWYVDGVEVHNAKTKPREEEYNSTYRVVSVLTVLHQDWLNGKEYKCKVSNKALPAPIEKTISKAKGQPREPQVYTLPPSREEMTKNQVSLTCDVSGFYPSDIAVEWESDGQPENNYKTTPPVLDSDGSFFLYSKLTVDKSRWEQGDVFSCSVMHEALHNHYTQKSLSLSPGK

SEQ ID NO: 24362 - protein, 121 aa, Artificial Sequence
  Description of Artificial Sequence: Synthetic polypeptide
  VH of XENP020604
EVKLEESGGGLVQPGGSMKLSCAASGFTFSDAWMDWVRQSPEKGLEWVAEIRTKANNHATYYAESVKGRFTISRDDSKSSVYLQMNSLRAEDTGIYYCTRLANWDYYFDVWGAGTTVTVSS

SEQ ID NO: 24363 - protein, 5 aa, Artificial Sequence
  Description of Artificial Sequence: Synthetic peptide
  XENP020604 vhCDR1
DAWMD

SEQ ID NO: 24364 - protein, 19 aa, Artificial Sequence
  Description of Artificial Sequence: Synthetic peptide
  XENP020604 vhCDR2
EIRTKANNHATYYAESVKG

SEQ ID NO: 24365 - protein, 10 aa, Artificial Sequence
  Description of Artificial Sequence: Synthetic peptide
  XENP020604 vhCDR3
LANWDYYFDV

SEQ ID NO: 24366 - protein, 218 aa, Artificial Sequence; identical to SEQ ID NO: 22266
  Description of Artificial Sequence: Synthetic polypeptide
  XENP020604 7G8_H0.148_L0_IgG1_PVA_/S267K Light Chain

SEQ ID NO: 24367 - protein, 111 aa, Artificial Sequence; identical to SEQ ID NO: 22267
  Description of Artificial Sequence: Synthetic polypeptide
  VL of XENP020604

SEQ ID NO: 24368 - protein, 15 aa, Artificial Sequence
  Description of Artificial Sequence: Synthetic peptide
  XENP020604 vlCDR1
KASQSVDYDGDSYMN

SEQ ID NO: 24369 - protein, 7 aa, Artificial Sequence
  Description of Artificial Sequence: Synthetic peptide
  XENP020604 vlCDR2
AASNLES

SEQ ID NO: 24370 - protein, 9 aa, Artificial Sequence
  Description of Artificial Sequence: Synthetic peptide
  XENP020604 vlCDR3
QQSNEDPFT

SEQ ID NO: 24371 - protein, 450 aa, Artificial Sequence; identical to SEQ ID NO: 22261
  Description of Artificial Sequence: Synthetic polypeptide
  XENP020605 7G8_H0_L0.1_IgG1_PVA_/S267K Heavy Chain

SEQ ID NO: 24372 - protein, 121 aa, Artificial Sequence; identical to SEQ ID NO: 22262
  Description of Artificial Sequence: Synthetic polypeptide
  VH of XENP020605

SEQ ID NO: 24373 - protein, 5 aa, Artificial Sequence
  Description of Artificial Sequence: Synthetic peptide
  XENP020605 vhCDR1
DAWMD

SEQ ID NO: 24374 - protein, 19 aa, Artificial Sequence
  Description of Artificial Sequence: Synthetic peptide
  XENP020605 vhCDR2
EIRTKANNHATYYAESVKG

SEQ ID NO: 24375 - protein, 10 aa, Artificial Sequence
  Description of Artificial Sequence: Synthetic peptide
  XENP020605 vhCDR3
LANWDWYFDV

SEQ ID NO: 24376 - protein, 218 aa, Artificial Sequence
  Description of Artificial Sequence: Synthetic polypeptide
  XENP020605 7G8_H0_L0.1_IgG1_PVA_/S267K Light Chain
DTVLTQSPASLAVSLGQRATISCKASQSVNYDGDSYMNWYQQKPGQPPKLLIYAASNLESGIPARLSGSGSGTDFTLNIHPVEEEDAATYYCQQSNEDPFTFGSGTKLEVKRTVAAPSVFIFPPSDEQLKSGTASVVCLLNNFYPREAKVQWKVDNALQSGNSQESVTEQDSKDSTYSLSSTLTLSKADYEKHKVYACEVTHQGLSSPVTKSFNRGEC

SEQ ID NO: 24377 - protein, 111 aa, Artificial Sequence
  Description of Artificial Sequence: Synthetic polypeptide
  VL of XENP020605
DTVLTQSPASLAVSLGQRATISCKASQSVNYDGDSYMNWYQQKPGQPPKLLIYAASNLESGIPARLSGSGSGTDFTLNIHPVEEEDAATYYCQQSNEDPFTFGSGTKLEVK

SEQ ID NO: 24378 - protein, 15 aa, Artificial Sequence
  Description of Artificial Sequence: Synthetic peptide
  XENP020605 vlCDR1
KASQSVNYDGDSYMN

SEQ ID NO: 24379 - protein, 7 aa, Artificial Sequence
  Description of Artificial Sequence: Synthetic peptide
  XENP020605 vlCDR2
AASNLES

SEQ ID NO: 24380 - protein, 9 aa, Artificial Sequence
  Description of Artificial Sequence: Synthetic peptide
  XENP020605 vlCDR3
QQSNEDPFT

SEQ ID NO: 24381 - protein, 450 aa, Artificial Sequence; identical to SEQ ID NO: 22261
  Description of Artificial Sequence: Synthetic polypeptide
  XENP020606 7G8_H0_L0.2_IgG1_PVA_/S267K Heavy Chain

SEQ ID NO: 24382 - protein, 121 aa, Artificial Sequence; identical to SEQ ID NO: 22262
  Description of Artificial Sequence: Synthetic polypeptide
  VH of XENP020606

SEQ ID NO: 24383 - protein, 5 aa, Artificial Sequence
  Description of Artificial Sequence: Synthetic peptide
  XENP020606 vhCDR1
DAWMD

SEQ ID NO: 24384 - protein, 19 aa, Artificial Sequence
  Description of Artificial Sequence: Synthetic peptide
  XENP020606 vhCDR2
EIRTKANNHATYYAESVKG

SEQ ID NO: 24385 - protein, 10 aa, Artificial Sequence
  Description of Artificial Sequence: Synthetic peptide
  XENP020606 vhCDR3
LANWDWYFDV

SEQ ID NO: 24386 - protein, 218 aa, Artificial Sequence
  Description of Artificial Sequence: Synthetic polypeptide
  XENP020606 7G8_H0_L0.2_IgG1_PVA_/S267K Light Chain
DTVLTQSPASLAVSLGQRATISCKASQSVEYDGDSYMNWYQQKPGQPPKLLIYAASNLESGIPARLSGSGSGTDFTLNIHPVEEEDAATYYCQQSNEDPFTFGSGTKLEVKRTVAAPSVFIFPPSDEQLKSGTASVVCLLNNFYPREAKVQWKVDNALQSGNSQESVTEQDSKDSTYSLSSTLTLSKADYEKHKVYACEVTHQGLSSPVTKSFNRGEC

SEQ ID NO: 24387 - protein, 111 aa, Artificial Sequence
  Description of Artificial Sequence: Synthetic polypeptide
  VL of XENP020606
DTVLTQSPASLAVSLGQRATISCKASQSVEYDGDSYMNWYQQKPGQPPKLLIYAASNLESGIPARLSGSGSGTDFTLNIHPVEEEDAATYYCQQSNEDPFTFGSGTKLEVK

SEQ ID NO: 24388 - protein, 15 aa, Artificial Sequence
  Description of Artificial Sequence: Synthetic peptide
  XENP020606 vlCDR1
KASQSVEYDGDSYMN

SEQ ID NO: 24389 - protein, 7 aa, Artificial Sequence
  Description of Artificial Sequence: Synthetic peptide
  XENP020606 vlCDR2
AASNLES

SEQ ID NO: 24390 - protein, 9 aa, Artificial Sequence
  Description of Artificial Sequence: Synthetic peptide
  XENP020606 vlCDR3
QQSNEDPFT

SEQ ID NO: 24391 - protein, 450 aa, Artificial Sequence; identical to SEQ ID NO: 22261
  Description of Artificial Sequence: Synthetic polypeptide
  XENP020607 7G8_H0_L0.3_IgG1_PVA_/S267K Heavy Chain

SEQ ID NO: 24392 - protein, 121 aa, Artificial Sequence; identical to SEQ ID NO: 22262
  Description of Artificial Sequence: Synthetic polypeptide
  VH of XENP020607

SEQ ID NO: 24393 - protein, 5 aa, Artificial Sequence
  Description of Artificial Sequence: Synthetic peptide
  XENP020607 vhCDR1
DAWMD

SEQ ID NO: 24394 - protein, 19 aa, Artificial Sequence
  Description of Artificial Sequence: Synthetic peptide
  XENP020607 vhCDR2
EIRTKANNHATYYAESVKG

SEQ ID NO: 24395 - protein, 10 aa, Artificial Sequence
  Description of Artificial Sequence: Synthetic peptide
  XENP020607 vhCDR3
LANWDWYFDV

SEQ ID NO: 24396 - protein, 218 aa, Artificial Sequence
  Description of Artificial Sequence: Synthetic polypeptide
  XENP020607 7G8_H0_L0.3_IgG1_PVA_/S267K Light Chain
DTVLTQSPASLAVSLGQRATISCKASQSVHYDGDSYMNWYQQKPGQPPKLLIYAASNLESGIPARLSGSGSGTDFTLNIHPVEEEDAATYYCQQSNEDPFTFGSGTKLEVKRTVAAPSVFIFPPSDEQLKSGTASVVCLLNNFYPREAKVQWKVDNALQSGNSQESVTEQDSKDSTYSLSSTLTLSKADYEKHKVYACEVTHQGLSSPVTKSFNRGEC

SEQ ID NO: 24397 - protein, 111 aa, Artificial Sequence
  Description of Artificial Sequence: Synthetic polypeptide
  VL of XENP020607
DTVLTQSPASLAVSLGQRATISCKASQSVHYDGDSYMNWYQQKPGQPPKLLIYAASNLESGIPARLSGSGSGTDFTLNIHPVEEEDAATYYCQQSNEDPFTFGSGTKLEVK

SEQ ID NO: 24398 - protein, 15 aa, Artificial Sequence
  Description of Artificial Sequence: Synthetic peptide
  XENP020607 vlCDR1
KASQSVHYDGDSYMN

SEQ ID NO: 24399 - protein, 7 aa, Artificial Sequence
  Description of Artificial Sequence: Synthetic peptide
  XENP020607 vlCDR2
AASNLES

SEQ ID NO: 24400 - protein, 9 aa, Artificial Sequence
  Description of Artificial Sequence: Synthetic peptide
  XENP020607 vlCDR3
QQSNEDPFT

SEQ ID NO: 24401 - protein, 450 aa, Artificial Sequence; identical to SEQ ID NO: 22261
  Description of Artificial Sequence: Synthetic polypeptide
  XENP020608 7G8_H0_L0.4_IgG1_PVA_/S267K Heavy Chain

SEQ ID NO: 24402 - protein, 121 aa, Artificial Sequence; identical to SEQ ID NO: 22262
  Description of Artificial Sequence: Synthetic polypeptide
  VH of XENP020608

SEQ ID NO: 24403 - protein, 5 aa, Artificial Sequence
  Description of Artificial Sequence: Synthetic peptide
  XENP020608 vhCDR1
DAWMD

SEQ ID NO: 24404 - protein, 19 aa, Artificial Sequence
  Description of Artificial Sequence: Synthetic peptide
  XENP020608 vhCDR2
EIRTKANNHATYYAESVKG

SEQ ID NO: 24405 - protein, 10 aa, Artificial Sequence
  Description of Artificial Sequence: Synthetic peptide
  XENP020608 vhCDR3
LANWDWYFDV

SEQ ID NO: 24406 - protein, 218 aa, Artificial Sequence
  Description of Artificial Sequence: Synthetic polypeptide
  XENP020608 7G8_H0_L0.4_IgG1_PVA_/S267K Light Chain
DTVLTQSPASLAVSLGQRATISCKASQSVSYDGDSYMNWYQQKPGQPPKLLIYAASNLESGIPARLSGSGSGTDFTLNIHPVEEEDAATYYCQQSNEDPFTFGSGTKLEVKRTVAAPSVFIFPPSDEQLKSGTASVVCLLNNFYPREAKVQWKVDNALQSGNSQESVTEQDSKDSTYSLSSTLTLSKADYEKHKVYACEVTHQGLSSPVTKSFNRGEC

SEQ ID NO: 24407 - protein, 111 aa, Artificial Sequence
  Description of Artificial Sequence: Synthetic polypeptide
  VL of XENP020608
DTVLTQSPASLAVSLGQRATISCKASQSVSYDGDSYMNWYQQKPGQPPKLLIYAASNLESGIPARLSGSGSGTDFTLNIHPVEEEDAATYYCQQSNEDPFTFGSGTKLEVK

SEQ ID NO: 24408 - protein, 15 aa, Artificial Sequence
  Description of Artificial Sequence: Synthetic peptide
  XENP020608 vlCDR1
KASQSVSYDGDSYMN

SEQ ID NO: 24409 - protein, 7 aa, Artificial Sequence
  Description of Artificial Sequence: Synthetic peptide
  XENP020608 vlCDR2
AASNLES

SEQ ID NO: 24410 - protein, 9 aa, Artificial Sequence
  Description of Artificial Sequence: Synthetic peptide
  XENP020608 vlCDR3
QQSNEDPFT

SEQ ID NO: 24411 - protein, 450 aa, Artificial Sequence; identical to SEQ ID NO: 22261
  Description of Artificial Sequence: Synthetic polypeptide
  XENP020609 7G8_H0_L0.5_IgG1_PVA_/S267K Heavy Chain

SEQ ID NO: 24412 - protein, 121 aa, Artificial Sequence; identical to SEQ ID NO: 22262
  Description of Artificial Sequence: Synthetic polypeptide
  VH of XENP020609

SEQ ID NO: 24413 - protein, 5 aa, Artificial Sequence
  Description of Artificial Sequence: Synthetic peptide
  XENP020609 vhCDR1
DAWMD

SEQ ID NO: 24414 - protein, 19 aa, Artificial Sequence
  Description of Artificial Sequence: Synthetic peptide
  XENP020609 vhCDR2
EIRTKANNHATYYAESVKG

SEQ ID NO: 24415 - protein, 10 aa, Artificial Sequence
  Description of Artificial Sequence: Synthetic peptide
  XENP020609 vhCDR3
LANWDWYFDV

SEQ ID NO: 24416 - protein, 218 aa, Artificial Sequence
  Description of Artificial Sequence: Synthetic polypeptide
  XENP020609 7G8_H0_L0.5_IgG1_PVA_/S267K Light Chain
DTVLTQSPASLAVSLGQRATISCKASQSVRYDGDSYMNWYQQKPGQPPKLLIYAASNLESGIPARLSGSGSGTDFTLNIHPVEEEDAATYYCQQSNEDPFTFGSGTKLEVKRTVAAPSVFIFPPSDEQLKSGTASVVCLLNNFYPREAKVQWKVDNALQSGNSQESVTEQDSKDSTYSLSSTLTLSKADYEKHKVYACEVTHQGLSSPVTKSFNRGEC

SEQ ID NO: 24417 - protein, 111 aa, Artificial Sequence
  Description of Artificial Sequence: Synthetic polypeptide
  VL of XENP020609
DTVLTQSPASLAVSLGQRATISCKASQSVRYDGDSYMNWYQQKPGQPPKLLIYAASNLESGIPARLSGSGSGTDFTLNIHPVEEEDAATYYCQQSNEDPFTFGSGTKLEVK

SEQ ID NO: 24418 - protein, 15 aa, Artificial Sequence
  Description of Artificial Sequence: Synthetic peptide
  XENP020609 vlCDR1
KASQSVRYDGDSYMN

SEQ ID NO: 24419 - protein, 7 aa, Artificial Sequence
  Description of Artificial Sequence: Synthetic peptide
  XENP020609 vlCDR2
AASNLES

SEQ ID NO: 24420 - protein, 9 aa, Artificial Sequence
  Description of Artificial Sequence: Synthetic peptide
  XENP020609 vlCDR3
QQSNEDPFT

SEQ ID NO: 24421 - protein, 450 aa, Artificial Sequence; identical to SEQ ID NO: 22261
  Description of Artificial Sequence: Synthetic polypeptide
  XENP020610 7G8_H0_L0.6_IgG1_PVA_/S267K Heavy Chain

SEQ ID NO: 24422 - protein, 121 aa, Artificial Sequence; identical to SEQ ID NO: 22262
  Description of Artificial Sequence: Synthetic polypeptide
  VH of XENP020610

SEQ ID NO: 24423 - protein, 5 aa, Artificial Sequence
  Description of Artificial Sequence: Synthetic peptide
  XENP020610 vhCDR1
DAWMD

SEQ ID NO: 24424 - protein, 19 aa, Artificial Sequence
  Description of Artificial Sequence: Synthetic peptide
  XENP020610 vhCDR2
EIRTKANNHATYYAESVKG

SEQ ID NO: 24425 - protein, 10 aa, Artificial Sequence
  Description of Artificial Sequence: Synthetic peptide
  XENP020610 vhCDR3
LANWDWYFDV

SEQ ID NO: 24426 - protein, 218 aa, Artificial Sequence
  Description of Artificial Sequence: Synthetic polypeptide
  XENP020610 7G8_H0_L0.6_IgG1_PVA_/S267K Light Chain
DTVLTQSPASLAVSLGQRATISCKASQSVLYDGDSYMNWYQQKPGQPPKLLIYAASNLESGIPARLSGSGSGTDFTLNIHPVEEEDAATYYCQQSNEDPFTFGSGTKLEVKRTVAAPSVFIFPPSDEQLKSGTASVVCLLNNFYPREAKVQWKVDNALQSGNSQESVTEQDSKDSTYSLSSTLTLSKADYEKHKVYACEVTHQGLSSPVTKSFNRGEC

SEQ ID NO: 24427 - protein, 111 aa, Artificial Sequence
  Description of Artificial Sequence: Synthetic polypeptide
  VL of XENP020610
DTVLTQSPASLAVSLGQRATISCKASQSVLYDGDSYMNWYQQKPGQPPKLLIYAASNLESGIPARLSGSGSGTDFTLNIHPVEEEDAATYYCQQSNEDPFTFGSGTKLEVK

SEQ ID NO: 24428 - protein, 15 aa, Artificial Sequence
  Description of Artificial Sequence: Synthetic peptide
  XENP020610 vlCDR1
KASQSVLYDGDSYMN

SEQ ID NO: 24429 - protein, 7 aa, Artificial Sequence
  Description of Artificial Sequence: Synthetic peptide
  XENP020610 vlCDR2
AASNLES

SEQ ID NO: 24430 - protein, 9 aa, Artificial Sequence
  Description of Artificial Sequence: Synthetic peptide
  XENP020610 vlCDR3
QQSNEDPFT

SEQ ID NO: 24431 - protein, 450 aa, Artificial Sequence; identical to SEQ ID NO: 22261
  Description of Artificial Sequence: Synthetic polypeptide
  XENP020611 7G8_H0_L0.7_IgG1_PVA_/S267K Heavy Chain

SEQ ID NO: 24432 - protein, 121 aa, Artificial Sequence; identical to SEQ ID NO: 22262
  Description of Artificial Sequence: Synthetic polypeptide
  VH of XENP020611

SEQ ID NO: 24433 - protein, 5 aa, Artificial Sequence
  Description of Artificial Sequence: Synthetic peptide
  XENP020611 vhCDR1
DAWMD

SEQ ID NO: 24434 - protein, 19 aa, Artificial Sequence
  Description of Artificial Sequence: Synthetic peptide
  XENP020611 vhCDR2
EIRTKANNHATYYAESVKG

SEQ ID NO: 24435 - protein, 10 aa, Artificial Sequence
  Description of Artificial Sequence: Synthetic peptide
  XENP020611 vhCDR3
LANWDWYFDV

SEQ ID NO: 24436 - protein, 218 aa, Artificial Sequence
  Description of Artificial Sequence: Synthetic polypeptide
  XENP020611 7G8_H0_L0.7_IgG1_PVA_/S267K Light Chain
DTVLTQSPASLAVSLGQRATISCKASQSVTYDGDSYMNWYQQKPGQPPKLLIYAASNLESGIPARLSGSGSGTDFTLNIHPVEEEDAATYYCQQSNEDPFTFGSGTKLEVKRTVAAPSVFIFPPSDEQLKSGTASVVCLLNNFYPREAKVQWKVDNALQSGNSQESVTEQDSKDSTYSLSSTLTLSKADYEKHKVYACEVTHQGLSSPVTKSFNRGEC

SEQ ID NO: 24437 - protein, 111 aa, Artificial Sequence
  Description of Artificial Sequence: Synthetic polypeptide
  VL of XENP020611
DTVLTQSPASLAVSLGQRATISCKASQSVTYDGDSYMNWYQQKPGQPPKLLIYAASNLESGIPARLSGSGSGTDFTLNIHPVEEEDAATYYCQQSNEDPFTFGSGTKLEVK

SEQ ID NO: 24438 - protein, 15 aa, Artificial Sequence
  Description of Artificial Sequence: Synthetic peptide
  XENP020611 vlCDR1
KASQSVTYDGDSYMN

SEQ ID NO: 24439 - protein, 7 aa, Artificial Sequence
  Description of Artificial Sequence: Synthetic peptide
  XENP020611 vlCDR2
AASNLES

SEQ ID NO: 24440 - protein, 9 aa, Artificial Sequence
  Description of Artificial Sequence: Synthetic peptide
  XENP020611 vlCDR3
QQSNEDPFT

SEQ ID NO: 24441 - protein, 450 aa, Artificial Sequence; identical to SEQ ID NO: 22261
  Description of Artificial Sequence: Synthetic polypeptide
  XENP020612 7G8_H0_L0.8_IgG1_PVA_/S267K Heavy Chain

SEQ ID NO: 24442 - protein, 121 aa, Artificial Sequence; identical to SEQ ID NO: 22262
  Description of Artificial Sequence: Synthetic polypeptide
  VH of XENP020612

SEQ ID NO: 24443 - protein, 5 aa, Artificial Sequence
  Description of Artificial Sequence: Synthetic peptide
  XENP020612 vhCDR1
DAWMD

SEQ ID NO: 24444 - protein, 19 aa, Artificial Sequence
  Description of Artificial Sequence: Synthetic peptide
  XENP020612 vhCDR2
EIRTKANNHATYYAESVKG

SEQ ID NO: 24445 - protein, 10 aa, Artificial Sequence
  Description of Artificial Sequence: Synthetic peptide
  XENP020612 vhCDR3
LANWDWYFDV

SEQ ID NO: 24446 - protein, 218 aa, Artificial Sequence
  Description of Artificial Sequence: Synthetic polypeptide
  XENP020612 7G8_H0_L0.8_IgG1_PVA_/S267K Light Chain
DTVLTQSPASLAVSLGQRATISCKASQSVGYDGDSYMNWYQQKPGQPPKLLIYAASNLESGIPARLSGSGSGTDFTLNIHPVEEEDAATYYCQQSNEDPFTFGSGTKLEVKRTVAAPSVFIFPPSDEQLKSGTASVVCLLNNFYPREAKVQWKVDNALQSGNSQESVTEQDSKDSTYSLSSTLTLSKADYEKHKVYACEVTHQGLSSPVTKSFNRGEC

SEQ ID NO: 24447 - protein, 111 aa, Artificial Sequence
  Description of Artificial Sequence: Synthetic polypeptide
  VL of XENP020612
DTVLTQSPASLAVSLGQRATISCKASQSVGYDGDSYMNWYQQKPGQPPKLLIYAASNLESGIPARLSGSGSGTDFTLNIHPVEEEDAATYYCQQSNEDPFTFGSGTKLEVK

SEQ ID NO: 24448 - protein, 15 aa, Artificial Sequence
  Description of Artificial Sequence: Synthetic peptide
  XENP020612 vlCDR1
KASQSVGYDGDSYMN

SEQ ID NO: 24449 - protein, 7 aa, Artificial Sequence
  Description of Artificial Sequence: Synthetic peptide
  XENP020612 vlCDR2
AASNLES

SEQ ID NO: 24450 - protein, 9 aa, Artificial Sequence
  Description of Artificial Sequence: Synthetic peptide
  XENP020612 vlCDR3
QQSNEDPFT

SEQ ID NO: 24451 - protein, 450 aa, Artificial Sequence; identical to SEQ ID NO: 22261
  Description of Artificial Sequence: Synthetic polypeptide
  XENP020613 7G8_H0_L0.9_IgG1_PVA_/S267K Heavy Chain

SEQ ID NO: 24452 - protein, 121 aa, Artificial Sequence; identical to SEQ ID NO: 22262
  Description of Artificial Sequence: Synthetic polypeptide
  VH of XENP020613

SEQ ID NO: 24453 - protein, 5 aa, Artificial Sequence
  Description of Artificial Sequence: Synthetic peptide
  XENP020613 vhCDR1
DAWMD

SEQ ID NO: 24454 - protein, 19 aa, Artificial Sequence
  Description of Artificial Sequence: Synthetic peptide
  XENP020613 vhCDR2
EIRTKANNHATYYAESVKG

SEQ ID NO: 24455 - protein, 10 aa, Artificial Sequence
  Description of Artificial Sequence: Synthetic peptide
  XENP020613 vhCDR3
LANWDWYFDV

SEQ ID NO: 24456 - protein, 218 aa, Artificial Sequence
  Description of Artificial Sequence: Synthetic polypeptide
  XENP020613 7G8_H0_L0.9_IgG1_PVA_/S267K Light Chain
DTVLTQSPASLAVSLGQRATISCKASQSVYYDGDSYMNWYQQKPGQPPKLLIYAASNLESGIPARLSGSGSGTDFTLNIHPVEEEDAATYYCQQSNEDPFTFGSGTKLEVKRTVAAPSVFIFPPSDEQLKSGTASVVCLLNNFYPREAKVQWKVDNALQSGNSQESVTEQDSKDSTYSLSSTLTLSKADYEKHKVYACEVTHQGLSSPVTKSFNRGEC

SEQ ID NO: 24457 - protein, 111 aa, Artificial Sequence
  Description of Artificial Sequence: Synthetic polypeptide
  VL of XENP020613
DTVLTQSPASLAVSLGQRATISCKASQSVYYDGDSYMNWYQQKPGQPPKLLIYAASNLESGIPARLSGSGSGTDFTLNIHPVEEEDAATYYCQQSNEDPFTFGSGTKLEVK

SEQ ID NO: 24458 - protein, 15 aa, Artificial Sequence
  Description of Artificial Sequence: Synthetic peptide
  XENP020613 vlCDR1
KASQSVYYDGDSYMN

SEQ ID NO: 24459 - protein, 7 aa, Artificial Sequence
  Description of Artificial Sequence: Synthetic peptide
  XENP020613 vlCDR2
AASNLES

SEQ ID NO: 24460 - protein, 9 aa, Artificial Sequence
  Description of Artificial Sequence: Synthetic peptide
  XENP020613 vlCDR3
QQSNEDPFT

SEQ ID NO: 24461 - protein, 450 aa, Artificial Sequence; identical to SEQ ID NO: 22261
  Description of Artificial Sequence: Synthetic polypeptide
  XENP020614 7G8_H0_L0.10_IgG1_PVA_/S267K Heavy Chain

SEQ ID NO: 24462 - protein, 121 aa, Artificial Sequence; identical to SEQ ID NO: 22262
  Description of Artificial Sequence: Synthetic polypeptide
  VH of XENP020614

SEQ ID NO: 24463 - protein, 5 aa, Artificial Sequence
  Description of Artificial Sequence: Synthetic peptide
  XENP020614 vhCDR1
DAWMD

SEQ ID NO: 24464 - protein, 19 aa, Artificial Sequence
  Description of Artificial Sequence: Synthetic peptide
  XENP020614 vhCDR2
EIRTKANNHATYYAESVKG

SEQ ID NO: 24465 - protein, 10 aa, Artificial Sequence
  Description of Artificial Sequence: Synthetic peptide
  XENP020614 vhCDR3
LANWDWYFDV

SEQ ID NO: 24466 - protein, 218 aa, Artificial Sequence
  Description of Artificial Sequence: Synthetic polypeptide
  XENP020614 7G8_H0_L0.10_IgG1_PVA_/S267K Light Chain
DTVLTQSPASLAVSLGQRATISCKASQSVDFDGDSYMNWYQQKPGQPPKLLIYAASNLESGIPARLSGSGSGTDFTLNIHPVEEEDAATYYCQQSNEDPFTFGSGTKLEVKRTVAAPSVFIFPPSDEQLKSGTASVVCLLNNFYPREAKVQWKVDNALQSGNSQESVTEQDSKDSTYSLSSTLTLSKADYEKHKVYACEVTHQGLSSPVTKSFNRGEC

SEQ ID NO: 24467 - protein, 111 aa, Artificial Sequence
  Description of Artificial Sequence: Synthetic polypeptide
  VL of XENP020614
DTVLTQSPASLAVSLGQRATISCKASQSVDFDGDSYMNWYQQKPGQPPKLLIYAASNLESGIPARLSGSGSGTDFTLNIHPVEEEDAATYYCQQSNEDPFTFGSGTKLEVK

SEQ ID NO: 24468 - protein, 15 aa, Artificial Sequence
  Description of Artificial Sequence: Synthetic peptide
  XENP020614 vlCDR1
KASQSVDFDGDSYMN

SEQ ID NO: 24469 - protein, 7 aa, Artificial Sequence
  Description of Artificial Sequence: Synthetic peptide
  XENP020614 vlCDR2
AASNLES

SEQ ID NO: 24470 - protein, 9 aa, Artificial Sequence
  Description of Artificial Sequence: Synthetic peptide
  XENP020614 vlCDR3
QQSNEDPFT

SEQ ID NO: 24471 - protein, 450 aa, Artificial Sequence; identical to SEQ ID NO: 22261
  Description of Artificial Sequence: Synthetic polypeptide
  XENP020615 7G8_H0_L0.11_IgG1_PVA_/S267K Heavy Chain

SEQ ID NO: 24472 - protein, 121 aa, Artificial Sequence; identical to SEQ ID NO: 22262
  Description of Artificial Sequence: Synthetic polypeptide
  VH of XENP020615

SEQ ID NO: 24473 - protein, 5 aa, Artificial Sequence
  Description of Artificial Sequence: Synthetic peptide
  XENP020615 vhCDR1
DAWMD

SEQ ID NO: 24474 - protein, 19 aa, Artificial Sequence
  Description of Artificial Sequence: Synthetic peptide
  XENP020615 vhCDR2
EIRTKANNHATYYAESVKG

SEQ ID NO: 24475 - protein, 10 aa, Artificial Sequence
  Description of Artificial Sequence: Synthetic peptide
  XENP020615 vhCDR3
LANWDWYFDV

SEQ ID NO: 24476 - protein, 218 aa, Artificial Sequence
  Description of Artificial Sequence: Synthetic polypeptide
  XENP020615 7G8_H0_L0.11_IgG1_PVA_/S267K Light Chain
DTVLTQSPASLAVSLGQRATISCKASQSVDHDGDSYMNWYQQKPGQPPKLLIYAASNLESGIPARLSGSGSGTDFTLNIHPVEEEDAATYYCQQSNEDPFTFGSGTKLEVKRTVAAPSVFIFPPSDEQLKSGTASVVCLLNNFYPREAKVQWKVDNALQSGNSQESVTEQDSKDSTYSLSSTLTLSKADYEKHKVYACEVTHQGLSSPVTKSFNRGEC

SEQ ID NO: 24477 - protein, 111 aa, Artificial Sequence
  Description of Artificial Sequence: Synthetic polypeptide
  VL of XENP020615
DTVLTQSPASLAVSLGQRATISCKASQSVDHDGDSYMNWYQQKPGQPPKLLIYAASNLESGIPARLSGSGSGTDFTLNIHPVEEEDAATYYCQQSNEDPFTFGSGTKLEVK

SEQ ID NO: 24478 - protein, 15 aa, Artificial Sequence
  Description of Artificial Sequence: Synthetic peptide
  XENP020615 vlCDR1
KASQSVDHDGDSYMN

SEQ ID NO: 24479 - protein, 7 aa, Artificial Sequence
  Description of Artificial Sequence: Synthetic peptide
  XENP020615 vlCDR2
AASNLES

SEQ ID NO: 24480 - protein, 9 aa, Artificial Sequence
  Description of Artificial Sequence: Synthetic peptide
  XENP020615 vlCDR3
QQSNEDPFT

SEQ ID NO: 24481 - protein, 450 aa, Artificial Sequence; identical to SEQ ID NO: 22261
  Description of Artificial Sequence: Synthetic polypeptide
  XENP020616 7G8_H0_L0.12_IgG1_PVA_/S267K Heavy Chain

SEQ ID NO: 24482 - protein, 121 aa, Artificial Sequence; identical to SEQ ID NO: 22262
  Description of Artificial Sequence: Synthetic polypeptide
  VH of XENP020616

SEQ ID NO: 24483 - protein, 5 aa, Artificial Sequence
  Description of Artificial Sequence: Synthetic peptide
  XENP020616 vhCDR1
DAWMD

SEQ ID NO: 24484 - protein, 19 aa, Artificial Sequence
  Description of Artificial Sequence: Synthetic peptide
  XENP020616 vhCDR2
EIRTKANNHATYYAESVKG

SEQ ID NO: 24485 - protein, 10 aa, Artificial Sequence
  Description of Artificial Sequence: Synthetic peptide
  XENP020616 vhCDR3
LANWDWYFDV

SEQ ID NO: 24486 - protein, 218 aa, Artificial Sequence
  Description of Artificial Sequence: Synthetic polypeptide
  XENP020616 7G8_H0_L0.12_IgG1_PVA_/S267K Light Chain
DTVLTQSPASLAVSLGQRATISCKASQSVDLDGDSYMNWYQQKPGQPPKLLIYAASNLESGIPARLSGSGSGTDFTLNIHPVEEEDAATYYCQQSNEDPFTFGSGTKLEVKRTVAAPSVFIFPPSDEQLKSGTASVVCLLNNFYPREAKVQWKVDNALQSGNSQESVTEQDSKDSTYSLSSTLTLSKADYEKHKVYACEVTHQGLSSPVTKSFNRGEC

SEQ ID NO: 24487 - protein, 111 aa, Artificial Sequence
  Description of Artificial Sequence: Synthetic polypeptide
  VL of XENP020616
DTVLTQSPASLAVSLGQRATISCKASQSVDLDGDSYMNWYQQKPGQPPKLLIYAASNLESGIPARLSGSGSGTDFTLNIHPVEEEDAATYYCQQSNEDPFTFGSGTKLEVK

SEQ ID NO: 24488 - protein, 15 aa, Artificial Sequence
  Description of Artificial Sequence: Synthetic peptide
  XENP020616 vlCDR1
KASQSVDLDGDSYMN

SEQ ID NO: 24489 - protein, 7 aa, Artificial Sequence
  Description of Artificial Sequence: Synthetic peptide
  XENP020616 vlCDR2
AASNLES

SEQ ID NO: 24490 - protein, 9 aa, Artificial Sequence
  Description of Artificial Sequence: Synthetic peptide
  XENP020616 vlCDR3
QQSNEDPFT

SEQ ID NO: 24491 - protein, 450 aa, Artificial Sequence; identical to SEQ ID NO: 22261
  Description of Artificial Sequence: Synthetic polypeptide
  XENP020617 7G8_H0_L0.13_IgG1_PVA_/S267K Heavy Chain

SEQ ID NO: 24492 - protein, 121 aa, Artificial Sequence; identical to SEQ ID NO: 22262
  Description of Artificial Sequence: Synthetic polypeptide
  VH of XENP020617

SEQ ID NO: 24493 - protein, 5 aa, Artificial Sequence
  Description of Artificial Sequence: Synthetic peptide
  XENP020617 vhCDR1
DAWMD

SEQ ID NO: 24494 - protein, 19 aa, Artificial Sequence
  Description of Artificial Sequence: Synthetic peptide
  XENP020617 vhCDR2
EIRTKANNHATYYAESVKG

SEQ ID NO: 24495 - protein, 10 aa, Artificial Sequence
  Description of Artificial Sequence: Synthetic peptide
  XENP020617 vhCDR3
LANWDWYFDV

SEQ ID NO: 24496 - protein, 218 aa, Artificial Sequence
  Description of Artificial Sequence: Synthetic polypeptide
  XENP020617 7G8_H0_L0.13_IgG1_PVA_/S267K Light Chain
DTVLTQSPASLAVSLGQRATISCKASQSVDWDGDSYMNWYQQKPGQPPKLLIYAASNLESGIPARLSGSGSGTDFTLNIHPVEEEDAATYYCQQSNEDPFTFGSGTKLEVKRTVAAPSVFIFPPSDEQLKSGTASVVCLLNNFYPREAKVQWKVDNALQSGNSQESVTEQDSKDSTYSLSSTLTLSKADYEKHKVYACEVTHQGLSSPVTKSFNRGEC

SEQ ID NO: 24497 - protein, 111 aa, Artificial Sequence
  Description of Artificial Sequence: Synthetic polypeptide
  VL of XENP020617
DTVLTQSPASLAVSLGQRATISCKASQSVDWDGDSYMNWYQQKPGQPPKLLIYAASNLESGIPARLSGSGSGTDFTLNIHPVEEEDAATYYCQQSNEDPFTFGSGTKLEVK

SEQ ID NO: 24498 - protein, 15 aa, Artificial Sequence
  Description of Artificial Sequence: Synthetic peptide
  XENP020617 vlCDR1
KASQSVDWDGDSYMN

SEQ ID NO: 24499 - protein, 7 aa, Artificial Sequence
  Description of Artificial Sequence: Synthetic peptide
  XENP020617 vlCDR2
AASNLES

SEQ ID NO: 24500 - protein, 9 aa, Artificial Sequence
  Description of Artificial Sequence: Synthetic peptide
  XENP020617 vlCDR3
QQSNEDPFT

SEQ ID NO: 24501 - protein, 450 aa, Artificial Sequence; identical to SEQ ID NO: 22261
  Description of Artificial Sequence: Synthetic polypeptide
  XENP020618 7G8_H0_L0.14_IgG1_PVA_/S267K Heavy Chain

SEQ ID NO: 24502 - protein, 121 aa, Artificial Sequence; identical to SEQ ID NO: 22262
  Description of Artificial Sequence: Synthetic polypeptide
  VH of XENP020618

SEQ ID NO: 24503 - protein, 5 aa, Artificial Sequence
  Description of Artificial Sequence: Synthetic peptide
  XENP020618 vhCDR1
DAWMD

SEQ ID NO: 24504 - protein, 19 aa, Artificial Sequence
  Description of Artificial Sequence: Synthetic peptide
  XENP020618 vhCDR2
EIRTKANNHATYYAESVKG

SEQ ID NO: 24505 - protein, 10 aa, Artificial Sequence
  Description of Artificial Sequence: Synthetic peptide
  XENP020618 vhCDR3
LANWDWYFDV

SEQ ID NO: 24506 - protein, 218 aa, Artificial Sequence
  Description of Artificial Sequence: Synthetic polypeptide
  XENP020618 7G8_H0_L0.14_IgG1_PVA_/S267K Light Chain
DTVLTQSPASLAVSLGQRATISCKASQSVDVDGDSYMNWYQQKPGQPPKLLIYAASNLESGIPARLSGSGSGTDFTLNIHPVEEEDAATYYCQQSNEDPFTFGSGTKLEVKRTVAAPSVFIFPPSDEQLKSGTASVVCLLNNFYPREAKVQWKVDNALQSGNSQESVTEQDSKDSTYSLSSTLTLSKADYEKHKVYACEVTHQGLSSPVTKSFNRGEC

SEQ ID NO: 24507 - protein, 111 aa, Artificial Sequence
  Description of Artificial Sequence: Synthetic polypeptide
  VL of XENP020618
DTVLTQSPASLAVSLGQRATISCKASQSVDVDGDSYMNWYQQKPGQPPKLLIYAASNLESGIPARLSGSGSGTDFTLNIHPVEEEDAATYYCQQSNEDPFTFGSGTKLEVK

SEQ ID NO: 24508 - protein, 15 aa, Artificial Sequence
  Description of Artificial Sequence: Synthetic peptide
  XENP020618 vlCDR1
KASQSVDVDGDSYMN

SEQ ID NO: 24509 - protein, 7 aa, Artificial Sequence
  Description of Artificial Sequence: Synthetic peptide
  XENP020618 vlCDR2
AASNLES

SEQ ID NO: 24510 - protein, 9 aa, Artificial Sequence
  Description of Artificial Sequence: Synthetic peptide
  XENP020618 vlCDR3
QQSNEDPFT

SEQ ID NO: 24511 - protein, 450 aa, Artificial Sequence; identical to SEQ ID NO: 22261
  Description of Artificial Sequence: Synthetic polypeptide
  XENP020619 7G8_H0_L0.15_IgG1_PVA_/S267K Heavy Chain

SEQ ID NO: 24512 - protein, 121 aa, Artificial Sequence; identical to SEQ ID NO: 22262
  Description of Artificial Sequence: Synthetic polypeptide
  VH of XENP020619

SEQ ID NO: 24513 - protein, 5 aa, Artificial Sequence
  Description of Artificial Sequence: Synthetic peptide
  XENP020619 vhCDR1
DAWMD

SEQ ID NO: 24514 - protein, 19 aa, Artificial Sequence
  Description of Artificial Sequence: Synthetic peptide
  XENP020619 vhCDR2
EIRTKANNHATYYAESVKG

SEQ ID NO: 24515 - protein, 10 aa, Artificial Sequence
  Description of Artificial Sequence: Synthetic peptide
  XENP020619 vhCDR3
LANWDWYFDV

SEQ ID NO: 24516 - protein, 218 aa, Artificial Sequence
  Description of Artificial Sequence: Synthetic polypeptide
  XENP020619 7G8_H0_L0.15_IgG1_PVA_/S267K Light Chain
DTVLTQSPASLAVSLGQRATISCKASQSVDADGDSYMNWYQQKPGQPPKLLIYAASNLESGIPARLSGSGSGTDFTLNIHPVEEEDAATYYCQQSNEDPFTFGSGTKLEVKRTVAAPSVFIFPPSDEQLKSGTASVVCLLNNFYPREAKVQWKVDNALQSGNSQESVTEQDSKDSTYSLSSTLTLSKADYEKHKVYACEVTHQGLSSPVTKSFNRGEC

SEQ ID NO: 24517 - protein, 111 aa, Artificial Sequence
  Description of Artificial Sequence: Synthetic polypeptide
  VL of XENP020619
DTVLTQSPASLAVSLGQRATISCKASQSVDADGDSYMNWYQQKPGQPPKLLIYAASNLESGIPARLSGSGSGTDFTLNIHPVEEEDAATYYCQQSNEDPFTFGSGTKLEVK

SEQ ID NO: 24518 - protein, 15 aa, Artificial Sequence
  Description of Artificial Sequence: Synthetic peptide
  XENP020619 vlCDR1
KASQSVDADGDSYMN

SEQ ID NO: 24519 - protein, 7 aa, Artificial Sequence
  Description of Artificial Sequence: Synthetic peptide
  XENP020619 vlCDR2
AASNLES

SEQ ID NO: 24520 - protein, 9 aa, Artificial Sequence
  Description of Artificial Sequence: Synthetic peptide
  XENP020619 vlCDR3
QQSNEDPFT

SEQ ID NO: 24521 - protein, 450 aa, Artificial Sequence; identical to SEQ ID NO: 22261
  Description of Artificial Sequence: Synthetic polypeptide
  XENP020620 7G8_H0_L0.16_IgG1_PVA_/S267K Heavy Chain

SEQ ID NO: 24522 - protein, 121 aa, Artificial Sequence; identical to SEQ ID NO: 22262
  Description of Artificial Sequence: Synthetic polypeptide
  VH of XENP020620

SEQ ID NO: 24523 - protein, 5 aa, Artificial Sequence
  Description of Artificial Sequence: Synthetic peptide
  XENP020620 vhCDR1
DAWMD

SEQ ID NO: 24524 - protein, 19 aa, Artificial Sequence
  Description of Artificial Sequence: Synthetic peptide
  XENP020620 vhCDR2
EIRTKANNHATYYAESVKG

SEQ ID NO: 24525 - protein, 10 aa, Artificial Sequence
  Description of Artificial Sequence: Synthetic peptide
  XENP020620 vhCDR3
LANWDWYFDV

SEQ ID NO: 24526 - protein, 218 aa, Artificial Sequence
  Description of Artificial Sequence: Synthetic polypeptide
  XENP020620 7G8_H0_L0.16_IgG1_PVA_/S267K Light Chain
DTVLTQSPASLAVSLGQRATISCKASQSVDQDGDSYMNWYQQKPGQPPKLLIYAASNLESGIPARLSGSGSGTDFTLNIHPVEEEDAATYYCQQSNEDPFTFGSGTKLEVKRTVAAPSVFIFPPSDEQLKSGTASVVCLLNNFYPREAKVQWKVDNALQSGNSQESVTEQDSKDSTYSLSSTLTLSKADYEKHKVYACEVTHQGLSSPVTKSFNRGEC

SEQ ID NO: 24527 - protein, 111 aa, Artificial Sequence
  Description of Artificial Sequence: Synthetic polypeptide
  VL of XENP020620
DTVLTQSPASLAVSLGQRATISCKASQSVDQDGDSYMNWYQQKPGQPPKLLIYAASNLESGIPARLSGSGSGTDFTLNIHPVEEEDAATYYCQQSNEDPFTFGSGTKLEVK

SEQ ID NO: 24528 - protein, 15 aa, Artificial Sequence
  Description of Artificial Sequence: Synthetic peptide
  XENP020620 vlCDR1
KASQSVDQDGDSYMN

SEQ ID NO: 24529 - protein, 7 aa, Artificial Sequence
  Description of Artificial Sequence: Synthetic peptide
  XENP020620 vlCDR2
AASNLES

SEQ ID NO: 24530 - protein, 9 aa, Artificial Sequence
  Description of Artificial Sequence: Synthetic peptide
  XENP020620 vlCDR3
QQSNEDPFT

SEQ ID NO: 24531 - protein, 450 aa, Artificial Sequence; identical to SEQ ID NO: 22261
  Description of Artificial Sequence: Synthetic polypeptide
  XENP020621 7G8_H0_L0.17_IgG1_PVA_/S267K Heavy Chain

SEQ ID NO: 24532 - protein, 121 aa, Artificial Sequence; identical to SEQ ID NO: 22262
  Description of Artificial Sequence: Synthetic polypeptide
  VH of XENP020621

SEQ ID NO: 24533 - protein, 5 aa, Artificial Sequence
  Description of Artificial Sequence: Synthetic peptide
  XENP020621 vhCDR1
DAWMD

SEQ ID NO: 24534 - protein, 19 aa, Artificial Sequence
  Description of Artificial Sequence: Synthetic peptide
  XENP020621 vhCDR2
EIRTKANNHATYYAESVKG

SEQ ID NO: 24535 - protein, 10 aa, Artificial Sequence
  Description of Artificial Sequence: Synthetic peptide
  XENP020621 vhCDR3
LANWDWYFDV

SEQ ID NO: 24536 - protein, 218 aa, Artificial Sequence
  Description of Artificial Sequence: Synthetic polypeptide
  XENP020621 7G8_H0_L0.17_IgG1_PVA_/S267K Light Chain
DTVLTQSPASLAVSLGQRATISCKASQSVDDDGDSYMNWYQQKPGQPPKLLIYAASNLESGIPARLSGSGSGTDFTLNIHPVEEEDAATYYCQQSNEDPFTFGSGTKLEVKRTVAAPSVFIFPPSDEQLKSGTASVVCLLNNFYPREAKVQWKVDNALQSGNSQESVTEQDSKDSTYSLSSTLTLSKADYEKHKVYACEVTHQGLSSPVTKSFNRGEC

SEQ ID NO: 24537 - protein, 111 aa, Artificial Sequence
  Description of Artificial Sequence: Synthetic polypeptide
  VL of XENP020621
DTVLTQSPASLAVSLGQRATISCKASQSVDDDGDSYMNWYQQKPGQPPKLLIYAASNLESGIPARLSGSGSGTDFTLNIHPVEEEDAATYYCQQSNEDPFTFGSGTKLEVK

SEQ ID NO: 24538 - protein, 15 aa, Artificial Sequence
  Description of Artificial Sequence: Synthetic peptide
  XENP020621 vlCDR1
KASQSVDDDGDSYMN

SEQ ID NO: 24539 - protein, 7 aa, Artificial Sequence
  Description of Artificial Sequence: Synthetic peptide
  XENP020621 vlCDR2
AASNLES

SEQ ID NO: 24540 - protein, 9 aa, Artificial Sequence
  Description of Artificial Sequence: Synthetic peptide
  XENP020621 vlCDR3
QQSNEDPFT

SEQ ID NO: 24541 - protein, 450 aa, Artificial Sequence; identical to SEQ ID NO: 22261
  Description of Artificial Sequence: Synthetic polypeptide
  XENP020622 7G8_H0_L0.18_IgG1_PVA_/S267K Heavy Chain

SEQ ID NO: 24542 - protein, 121 aa, Artificial Sequence; identical to SEQ ID NO: 22262
  Description of Artificial Sequence: Synthetic polypeptide
  VH of XENP020622

SEQ ID NO: 24543 - protein, 5 aa, Artificial Sequence
  Description of Artificial Sequence: Synthetic peptide
  XENP020622 vhCDR1
DAWMD

SEQ ID NO: 24544 - protein, 19 aa, Artificial Sequence
  Description of Artificial Sequence: Synthetic peptide
  XENP020622 vhCDR2
EIRTKANNHATYYAESVKG

SEQ ID NO: 24545 - protein, 10 aa, Artificial Sequence
  Description of Artificial Sequence: Synthetic peptide
  XENP020622 vhCDR3
LANWDWYFDV

SEQ ID NO: 24546 - protein, 218 aa, Artificial Sequence
  Description of Artificial Sequence: Synthetic polypeptide
  XENP020622 7G8_H0_L0.18_IgG1_PVA_/S267K Light Chain
DTVLTQSPASLAVSLGQRATISCKASQSVDKDGDSYMNWYQQKPGQPPKLLIYAASNLESGIPARLSGSGSGTDFTLNIHPVEEEDAATYYCQQSNEDPFTFGSGTKLEVKRTVAAPSVFIFPPSDEQLKSGTASVVCLLNNFYPREAKVQWKVDNALQSGNSQESVTEQDSKDSTYSLSSTLTLSKADYEKHKVYACEVTHQGLSSPVTKSFNRGEC

SEQ ID NO: 24547 - protein, 111 aa, Artificial Sequence
  Description of Artificial Sequence: Synthetic polypeptide
  VL of XENP020622
DTVLTQSPASLAVSLGQRATISCKASQSVDKDGDSYMNWYQQKPGQPPKLLIYAASNLESGIPARLSGSGSGTDFTLNIHPVEEEDAATYYCQQSNEDPFTFGSGTKLEVK

SEQ ID NO: 24548 - protein, 15 aa, Artificial Sequence
  Description of Artificial Sequence: Synthetic peptide
  XENP020622 vlCDR1
KASQSVDKDGDSYMN

SEQ ID NO: 24549 - protein, 7 aa, Artificial Sequence
  Description of Artificial Sequence: Synthetic peptide
  XENP020622 vlCDR2
AASNLES

SEQ ID NO: 24550 - protein, 9 aa, Artificial Sequence
  Description of Artificial Sequence: Synthetic peptide
  XENP020622 vlCDR3
QQSNEDPFT

SEQ ID NO: 24551 - protein, 450 aa, Artificial Sequence; identical to SEQ ID NO: 22261
  Description of Artificial Sequence: Synthetic polypeptide
  XENP020623 7G8_H0_L0.19_IgG1_PVA_/S267K Heavy Chain

SEQ ID NO: 24552 - protein, 121 aa, Artificial Sequence; identical to SEQ ID NO: 22262
  Description of Artificial Sequence: Synthetic polypeptide
  VH of XENP020623

SEQ ID NO: 24553 - protein, 5 aa, Artificial Sequence
  Description of Artificial Sequence: Synthetic peptide
  XENP020623 vhCDR1
DAWMD

SEQ ID NO: 24554 - protein, 19 aa, Artificial Sequence
  Description of Artificial Sequence: Synthetic peptide
  XENP020623 vhCDR2
EIRTKANNHATYYAESVKG

SEQ ID NO: 24555 - protein, 10 aa, Artificial Sequence
  Description of Artificial Sequence: Synthetic peptide
  XENP020623 vhCDR3
LANWDWYFDV

SEQ ID NO: 24556 - protein, 218 aa, Artificial Sequence
  Description of Artificial Sequence: Synthetic polypeptide
  XENP020623 7G8_H0_L0.19_IgG1_PVA_/S267K Light Chain
DTVLTQSPASLAVSLGQRATISCKASQSVDNDGDSYMNWYQQKPGQPPKLLIYAASNLESGIPARLSGSGSGTDFTLNIHPVEEEDAATYYCQQSNEDPFTFGSGTKLEVKRTVAAPSVFIFPPSDEQLKSGTASVVCLLNNFYPREAKVQWKVDNALQSGNSQESVTEQDSKDSTYSLSSTLTLSKADYEKHKVYACEVTHQGLSSPVTKSFNRGEC

SEQ ID NO: 24557 - protein, 111 aa, Artificial Sequence
  Description of Artificial Sequence: Synthetic polypeptide
  VL of XENP020623
DTVLTQSPASLAVSLGQRATISCKASQSVDNDGDSYMNWYQQKPGQPPKLLIYAASNLESGIPARLSGSGSGTDFTLNIHPVEEEDAATYYCQQSNEDPFTFGSGTKLEVK

SEQ ID NO: 24558 - protein, 15 aa, Artificial Sequence
  Description of Artificial Sequence: Synthetic peptide
  XENP020623 vlCDR1
KASQSVDNDGDSYMN

SEQ ID NO: 24559 - protein, 7 aa, Artificial Sequence
  Description of Artificial Sequence: Synthetic peptide
  XENP020623 vlCDR2
AASNLES

SEQ ID NO: 24560 - protein, 9 aa, Artificial Sequence
  Description of Artificial Sequence: Synthetic peptide
  XENP020623 vlCDR3
QQSNEDPFT

SEQ ID NO: 24561 - protein, 450 aa, Artificial Sequence; identical to SEQ ID NO: 22261
  Description of Artificial Sequence: Synthetic polypeptide
  XENP020624 7G8_H0_L0.20_IgG1_PVA_/S267K Heavy Chain

SEQ ID NO: 24562 - protein, 121 aa, Artificial Sequence; identical to SEQ ID NO: 22262
  Description of Artificial Sequence: Synthetic polypeptide
  VH of XENP020624

SEQ ID NO: 24563 - protein, 5 aa, Artificial Sequence
  Description of Artificial Sequence: Synthetic peptide
  XENP020624 vhCDR1
DAWMD

SEQ ID NO: 24564 - protein, 19 aa, Artificial Sequence
  Description of Artificial Sequence: Synthetic peptide
  XENP020624 vhCDR2
EIRTKANNHATYYAESVKG

SEQ ID NO: 24565 - protein, 10 aa, Artificial Sequence
  Description of Artificial Sequence: Synthetic peptide
  XENP020624 vhCDR3
LANWDWYFDV

SEQ ID NO: 24566 - protein, 218 aa, Artificial Sequence
  Description of Artificial Sequence: Synthetic polypeptide
  XENP020624 7G8_H0_L0.20_IgG1_PVA_/S267K Light Chain
DTVLTQSPASLAVSLGQRATISCKASQSVDYNGDSYMNWYQQKPGQPPKLLIYAASNLESGIPARLSGSGSGTDFTLNIHPVEEEDAATYYCQQSNEDPFTFGSGTKLEVKRTVAAPSVFIFPPSDEQLKSGTASVVCLLNNFYPREAKVQWKVDNALQSGNSQESVTEQDSKDSTYSLSSTLTLSKADYEKHKVYACEVTHQGLSSPVTKSFNRGEC

SEQ ID NO: 24567 - protein, 111 aa, Artificial Sequence
  Description of Artificial Sequence: Synthetic polypeptide
  VL of XENP020624
DTVLTQSPASLAVSLGQRATISCKASQSVDYNGDSYMNWYQQKPGQPPKLLIYAASNLESGIPARLSGSGSGTDFTLNIHPVEEEDAATYYCQQSNEDPFTFGSGTKLEVK

SEQ ID NO: 24568 - protein, 15 aa, Artificial Sequence
  Description of Artificial Sequence: Synthetic peptide
  XENP020624 vlCDR1
KASQSVDYNGDSYMN

SEQ ID NO: 24569 - protein, 7 aa, Artificial Sequence
  Description of Artificial Sequence: Synthetic peptide
  XENP020624 vlCDR2
AASNLES

SEQ ID NO: 24570 - protein, 9 aa, Artificial Sequence
  Description of Artificial Sequence: Synthetic peptide
  XENP020624 vlCDR3
QQSNEDPFT

SEQ ID NO: 24571 - protein, 450 aa, Artificial Sequence; identical to SEQ ID NO: 22261
  Description of Artificial Sequence: Synthetic polypeptide
  XENP020625 7G8_H0_L0.21_IgG1_PVA_/S267K Heavy Chain

SEQ ID NO: 24572 - protein, 121 aa, Artificial Sequence; identical to SEQ ID NO: 22262
  Description of Artificial Sequence: Synthetic polypeptide
  VH of XENP020625

SEQ ID NO: 24573 - protein, 5 aa, Artificial Sequence
  Description of Artificial Sequence: Synthetic peptide
  XENP020625 vhCDR1
DAWMD

SEQ ID NO: 24574 - protein, 19 aa, Artificial Sequence
  Description of Artificial Sequence: Synthetic peptide
  XENP020625 vhCDR2
EIRTKANNHATYYAESVKG

SEQ ID NO: 24575 - protein, 10 aa, Artificial Sequence
  Description of Artificial Sequence: Synthetic peptide
  XENP020625 vhCDR3
LANWDWYFDV

SEQ ID NO: 24576 - protein, 218 aa, Artificial Sequence
  Description of Artificial Sequence: Synthetic polypeptide
  XENP020625 7G8_H0_L0.21_IgG1_PVA_/S267K Light Chain
DTVLTQSPASLAVSLGQRATISCKASQSVDYEGDSYMNWYQQKPGQPPKLLIYAASNLESGIPARLSGSGSGTDFTLNIHPVEEEDAATYYCQQSNEDPFTFGSGTKLEVKRTVAAPSVFIFPPSDEQLKSGTASVVCLLNNFYPREAKVQWKVDNALQSGNSQESVTEQDSKDSTYSLSSTLTLSKADYEKHKVYACEVTHQGLSSPVTKSFNRGEC

SEQ ID NO: 24577 - protein, 111 aa, Artificial Sequence
  Description of Artificial Sequence: Synthetic polypeptide
  VL of XENP020625
DTVLTQSPASLAVSLGQRATISCKASQSVDYEGDSYMNWYQQKPGQPPKLLIYAASNLESGIPARLSGSGSGTDFTLNIHPVEEEDAATYYCQQSNEDPFTFGSGTKLEVK

SEQ ID NO: 24578 - protein, 15 aa, Artificial Sequence
  Description of Artificial Sequence: Synthetic peptide
  XENP020625 vlCDR1
KASQSVDYEGDSYMN

SEQ ID NO: 24579 - protein, 7 aa, Artificial Sequence
  Description of Artificial Sequence: Synthetic peptide
  XENP020625 vlCDR2
AASNLES

SEQ ID NO: 24580 - protein, 9 aa, Artificial Sequence
  Description of Artificial Sequence: Synthetic peptide
  XENP020625 vlCDR3
QQSNEDPFT

SEQ ID NO: 24581 - protein, 450 aa, Artificial Sequence; identical to SEQ ID NO: 22261
  Description of Artificial Sequence: Synthetic polypeptide
  XENP020626 7G8_H0_L0.22_IgG1_PVA_/S267K Heavy Chain

SEQ ID NO: 24582 - protein, 121 aa, Artificial Sequence; identical to SEQ ID NO: 22262
  Description of Artificial Sequence: Synthetic polypeptide
  VH of XENP020626

SEQ ID NO: 24583 - protein, 5 aa, Artificial Sequence
  Description of Artificial Sequence: Synthetic peptide
  XENP020626 vhCDR1
DAWMD

SEQ ID NO: 24584 - protein, 19 aa, Artificial Sequence
  Description of Artificial Sequence: Synthetic peptide
  XENP020626 vhCDR2
EIRTKANNHATYYAESVKG

SEQ ID NO: 24585 - protein, 10 aa, Artificial Sequence
  Description of Artificial Sequence: Synthetic peptide
  XENP020626 vhCDR3
LANWDWYFDV

SEQ ID NO: 24586 - protein, 218 aa, Artificial Sequence
  Description of Artificial Sequence: Synthetic polypeptide
  XENP020626 7G8_H0_L0.22_IgG1_PVA_/S267K Light Chain
DTVLTQSPASLAVSLGQRATISCKASQSVDYHGDSYMNWYQQKPGQPPKLLIYAASNLESGIPARLSGSGSGTDFTLNIHPVEEEDAATYYCQQSNEDPFTFGSGTKLEVKRTVAAPSVFIFPPSDEQLKSGTASVVCLLNNFYPREAKVQWKVDNALQSGNSQESVTEQDSKDSTYSLSSTLTLSKADYEKHKVYACEVTHQGLSSPVTKSFNRGEC

SEQ ID NO: 24587 - protein, 111 aa, Artificial Sequence
  Description of Artificial Sequence: Synthetic polypeptide
  VL of XENP020626
DTVLTQSPASLAVSLGQRATISCKASQSVDYHGDSYMNWYQQKPGQPPKLLIYAASNLESGIPARLSGSGSGTDFTLNIHPVEEEDAATYYCQQSNEDPFTFGSGTKLEVK

SEQ ID NO: 24588 - protein, 15 aa, Artificial Sequence
  Description of Artificial Sequence: Synthetic peptide
  XENP020626 vlCDR1
KASQSVDYHGDSYMN

SEQ ID NO: 24589 - protein, 7 aa, Artificial Sequence
  Description of Artificial Sequence: Synthetic peptide
  XENP020626 vlCDR2
AASNLES

SEQ ID NO: 24590 - protein, 9 aa, Artificial Sequence
  Description of Artificial Sequence: Synthetic peptide
  XENP020626 vlCDR3
QQSNEDPFT

SEQ ID NO: 24591 - protein, 450 aa, Artificial Sequence; identical to SEQ ID NO: 22261
  Description of Artificial Sequence: Synthetic polypeptide
  XENP020627 7G8_H0_L0.23_IgG1_PVA_/S267K Heavy Chain

SEQ ID NO: 24592 - protein, 121 aa, Artificial Sequence; identical to SEQ ID NO: 22262
  Description of Artificial Sequence: Synthetic polypeptide
  VH of XENP020627

SEQ ID NO: 24593 - protein, 5 aa, Artificial Sequence
  Description of Artificial Sequence: Synthetic peptide
  XENP020627 vhCDR1
DAWMD

SEQ ID NO: 24594 - protein, 19 aa, Artificial Sequence
  Description of Artificial Sequence: Synthetic peptide
  XENP020627 vhCDR2
EIRTKANNHATYYAESVKG

SEQ ID NO: 24595 - protein, 10 aa, Artificial Sequence
  Description of Artificial Sequence: Synthetic peptide
  XENP020627 vhCDR3
LANWDWYFDV

SEQ ID NO: 24596 - protein, 218 aa, Artificial Sequence
  Description of Artificial Sequence: Synthetic polypeptide
  XENP020627 7G8_H0_L0.23_IgG1_PVA_/S267K Light Chain
DTVLTQSPASLAVSLGQRATISCKASQSVDYSGDSYMNWYQQKPGQPPKLLIYAASNLESGIPARLSGSGSGTDFTLNIHPVEEEDAATYYCQQSNEDPFTFGSGTKLEVKRTVAAPSVFIFPPSDEQLKSGTASVVCLLNNFYPREAKVQWKVDNALQSGNSQESVTEQDSKDSTYSLSSTLTLSKADYEKHKVYACEVTHQGLSSPVTKSFNRGEC

SEQ ID NO: 24597 - protein, 111 aa, Artificial Sequence
  Description of Artificial Sequence: Synthetic polypeptide
  VL of XENP020627
DTVLTQSPASLAVSLGQRATISCKASQSVDYSGDSYMNWYQQKPGQPPKLLIYAASNLESGIPARLSGSGSGTDFTLNIHPVEEEDAATYYCQQSNEDPFTFGSGTKLEVK

SEQ ID NO: 24598 - protein, 15 aa, Artificial Sequence
  Description of Artificial Sequence: Synthetic peptide
  XENP020627 vlCDR1
KASQSVDYSGDSYMN

SEQ ID NO: 24599 - protein, 7 aa, Artificial Sequence
  Description of Artificial Sequence: Synthetic peptide
  XENP020627 vlCDR2
AASNLES

SEQ ID NO: 24600 - protein, 9 aa, Artificial Sequence
  Description of Artificial Sequence: Synthetic peptide
  XENP020627 vlCDR3
QQSNEDPFT

SEQ ID NO: 24601 - protein, 450 aa, Artificial Sequence; identical to SEQ ID NO: 22261
  Description of Artificial Sequence: Synthetic polypeptide
  XENP020628 7G8_H0_L0.24_IgG1_PVA_/S267K Heavy Chain

SEQ ID NO: 24602 - protein, 121 aa, Artificial Sequence; identical to SEQ ID NO: 22262
  Description of Artificial Sequence: Synthetic polypeptide
  VH of XENP020628

SEQ ID NO: 24603 - protein, 5 aa, Artificial Sequence
  Description of Artificial Sequence: Synthetic peptide
  XENP020628 vhCDR1
DAWMD

SEQ ID NO: 24604 - protein, 19 aa, Artificial Sequence
  Description of Artificial Sequence: Synthetic peptide
  XENP020628 vhCDR2
EIRTKANNHATYYAESVKG

SEQ ID NO: 24605 - protein, 10 aa, Artificial Sequence
  Description of Artificial Sequence: Synthetic peptide
  XENP020628 vhCDR3
LANWDWYFDV

SEQ ID NO: 24606 - protein, 218 aa, Artificial Sequence
  Description of Artificial Sequence: Synthetic polypeptide
  XENP020628 7G8_H0_L0.24_IgG1_PVA_/S267K Light Chain
DTVLTQSPASLAVSLGQRATISCKASQSVDYRGDSYMNWYQQKPGQPPKLLIYAASNLESGIPARLSGSGSGTDFTLNIHPVEEEDAATYYCQQSNEDPFTFGSGTKLEVKRTVAAPSVFIFPPSDEQLKSGTASVVCLLNNFYPREAKVQWKVDNALQSGNSQESVTEQDSKDSTYSLSSTLTLSKADYEKHKVYACEVTHQGLSSPVTKSFNRGEC

SEQ ID NO: 24607 - protein, 111 aa, Artificial Sequence
  Description of Artificial Sequence: Synthetic polypeptide
  VL of XENP020628
DTVLTQSPASLAVSLGQRATISCKASQSVDYRGDSYMNWYQQKPGQPPKLLIYAASNLESGIPARLSGSGSGTDFTLNIHPVEEEDAATYYCQQSNEDPFTFGSGTKLEVK

SEQ ID NO: 24608 - protein, 15 aa, Artificial Sequence
  Description of Artificial Sequence: Synthetic peptide
  XENP020628 vlCDR1
KASQSVDYRGDSYMN

SEQ ID NO: 24609 - protein, 7 aa, Artificial Sequence
  Description of Artificial Sequence: Synthetic peptide
  XENP020628 vlCDR2
AASNLES

SEQ ID NO: 24610 - protein, 9 aa, Artificial Sequence
  Description of Artificial Sequence: Synthetic peptide
  XENP020628 vlCDR3
QQSNEDPFT

SEQ ID NO: 24611 - protein, 450 aa, Artificial Sequence; identical to SEQ ID NO: 22261
  Description of Artificial Sequence: Synthetic polypeptide
  XENP020629 7G8_H0_L0.25_IgG1_PVA_/S267K Heavy Chain

SEQ ID NO: 24612 - protein, 121 aa, Artificial Sequence; identical to SEQ ID NO: 22262
  Description of Artificial Sequence: Synthetic polypeptide
  VH of XENP020629

SEQ ID NO: 24613 - protein, 5 aa, Artificial Sequence
  Description of Artificial Sequence: Synthetic peptide
  XENP020629 vhCDR1
DAWMD

SEQ ID NO: 24614 - protein, 19 aa, Artificial Sequence
  Description of Artificial Sequence: Synthetic peptide
  XENP020629 vhCDR2
EIRTKANNHATYYAESVKG

SEQ ID NO: 24615 - protein, 10 aa, Artificial Sequence
  Description of Artificial Sequence: Synthetic peptide
  XENP020629 vhCDR3
LANWDWYFDV

SEQ ID NO: 24616 - protein, 218 aa, Artificial Sequence
  Description of Artificial Sequence: Synthetic polypeptide
  XENP020629 7G8_H0_L0.25_IgG1_PVA_/S267K Light Chain
DTVLTQSPASLAVSLGQRATISCKASQSVDYLGDSYMNWYQQKPGQPPKLLIYAASNLESGIPARLSGSGSGTDFTLNIHPVEEEDAATYYCQQSNEDPFTFGSGTKLEVKRTVAAPSVFIFPPSDEQLKSGTASVVCLLNNFYPREAKVQWKVDNALQSGNSQESVTEQDSKDSTYSLSSTLTLSKADYEKHKVYACEVTHQGLSSPVTKSFNRGEC

SEQ ID NO: 24617 - protein, 111 aa, Artificial Sequence
  Description of Artificial Sequence: Synthetic polypeptide
  VL of XENP020629
DTVLTQSPASLAVSLGQRATISCKASQSVDYLGDSYMNWYQQKPGQPPKLLIYAASNLESGIPARLSGSGSGTDFTLNIHPVEEEDAATYYCQQSNEDPFTFGSGTKLEVK

SEQ ID NO: 24618 - protein, 15 aa, Artificial Sequence
  Description of Artificial Sequence: Synthetic peptide
  XENP020629 vlCDR1
KASQSVDYLGDSYMN

SEQ ID NO: 24619 - protein, 7 aa, Artificial Sequence
  Description of Artificial Sequence: Synthetic peptide
  XENP020629 vlCDR2
AASNLES

SEQ ID NO: 24620 - protein, 9 aa, Artificial Sequence
  Description of Artificial Sequence: Synthetic peptide
  XENP020629 vlCDR3
QQSNEDPFT

SEQ ID NO: 24621 - protein, 450 aa, Artificial Sequence; identical to SEQ ID NO: 22261
  Description of Artificial Sequence: Synthetic polypeptide
  XENP020630 7G8_H0_L0.26_IgG1_PVA_/S267K Heavy Chain

SEQ ID NO: 24622 - protein, 121 aa, Artificial Sequence; identical to SEQ ID NO: 22262
  Description of Artificial Sequence: Synthetic polypeptide
  VH of XENP020630

SEQ ID NO: 24623 - protein, 5 aa, Artificial Sequence
  Description of Artificial Sequence: Synthetic peptide
  XENP020630 vhCDR1
DAWMD

SEQ ID NO: 24624 - protein, 19 aa, Artificial Sequence
  Description of Artificial Sequence: Synthetic peptide
  XENP020630 vhCDR2
EIRTKANNHATYYAESVKG

SEQ ID NO: 24625 - protein, 10 aa, Artificial Sequence
  Description of Artificial Sequence: Synthetic peptide
  XENP020630 vhCDR3
LANWDWYFDV

SEQ ID NO: 24626 - protein, 218 aa, Artificial Sequence
  Description of Artificial Sequence: Synthetic polypeptide
  XENP020630 7G8_H0_L0.26_IgG1_PVA_/S267K Light Chain
DTVLTQSPASLAVSLGQRATISCKASQSVDYTGDSYMNWYQQKPGQPPKLLIYAASNLESGIPARLSGSGSGTDFTLNIHPVEEEDAATYYCQQSNEDPFTFGSGTKLEVKRTVAAPSVFIFPPSDEQLKSGTASVVCLLNNFYPREAKVQWKVDNALQSGNSQESVTEQDSKDSTYSLSSTLTLSKADYEKHKVYACEVTHQGLSSPVTKSFNRGEC

SEQ ID NO: 24627 - protein, 111 aa, Artificial Sequence
  Description of Artificial Sequence: Synthetic polypeptide
  VL of XENP020630
DTVLTQSPASLAVSLGQRATISCKASQSVDYTGDSYMNWYQQKPGQPPKLLIYAASNLESGIPARLSGSGSGTDFTLNIHPVEEEDAATYYCQQSNEDPFTFGSGTKLEVK

SEQ ID NO: 24628 - protein, 15 aa, Artificial Sequence
  Description of Artificial Sequence: Synthetic peptide
  XENP020630 vlCDR1
KASQSVDYTGDSYMN

SEQ ID NO: 24629 - protein, 7 aa, Artificial Sequence
  Description of Artificial Sequence: Synthetic peptide
  XENP020630 vlCDR2
AASNLES

SEQ ID NO: 24630 - protein, 9 aa, Artificial Sequence
  Description of Artificial Sequence: Synthetic peptide
  XENP020630 vlCDR3
QQSNEDPFT

SEQ ID NO: 24631 - protein, 450 aa, Artificial Sequence; identical to SEQ ID NO: 22261
  Description of Artificial Sequence: Synthetic polypeptide
  XENP020631 7G8_H0_L0.27_IgG1_PVA_/S267K Heavy Chain

SEQ ID NO: 24632 - protein, 121 aa, Artificial Sequence; identical to SEQ ID NO: 22262
  Description of Artificial Sequence: Synthetic polypeptide
  VH of XENP020631

SEQ ID NO: 24633 - protein, 5 aa, Artificial Sequence
  Description of Artificial Sequence: Synthetic peptide
  XENP020631 vhCDR1
DAWMD

SEQ ID NO: 24634 - protein, 19 aa, Artificial Sequence
  Description of Artificial Sequence: Synthetic peptide
  XENP020631 vhCDR2
EIRTKANNHATYYAESVKG

SEQ ID NO: 24635 - protein, 10 aa, Artificial Sequence
  Description of Artificial Sequence: Synthetic peptide
  XENP020631 vhCDR3
LANWDWYFDV

SEQ ID NO: 24636 - protein, 218 aa, Artificial Sequence
  Description of Artificial Sequence: Synthetic polypeptide
  XENP020631 7G8_H0_L0.27_IgG1_PVA_/S267K Light Chain
DTVLTQSPASLAVSLGQRATISCKASQSVDYGGDSYMNWYQQKPGQPPKLLIYAASNLESGIPARLSGSGSGTDFTLNIHPVEEEDAATYYCQQSNEDPFTFGSGTKLEVKRTVAAPSVFIFPPSDEQLKSGTASVVCLLNNFYPREAKVQWKVDNALQSGNSQESVTEQDSKDSTYSLSSTLTLSKADYEKHKVYACEVTHQGLSSPVTKSFNRGEC

SEQ ID NO: 24637 - protein, 111 aa, Artificial Sequence
  Description of Artificial Sequence: Synthetic polypeptide
  VL of XENP020631
DTVLTQSPASLAVSLGQRATISCKASQSVDYGGDSYMNWYQQKPGQPPKLLIYAASNLESGIPARLSGSGSGTDFTLNIHPVEEEDAATYYCQQSNEDPFTFGSGTKLEVK

SEQ ID NO: 24638 - protein, 15 aa, Artificial Sequence
  Description of Artificial Sequence: Synthetic peptide
  XENP020631 vlCDR1
KASQSVDYGGDSYMN

SEQ ID NO: 24639 - protein, 7 aa, Artificial Sequence
  Description of Artificial Sequence: Synthetic peptide
  XENP020631 vlCDR2
AASNLES

SEQ ID NO: 24640 - protein, 9 aa, Artificial Sequence
  Description of Artificial Sequence: Synthetic peptide
  XENP020631 vlCDR3
QQSNEDPFT

SEQ ID NO: 24641 - protein, 450 aa, Artificial Sequence; identical to SEQ ID NO: 22261
  Description of Artificial Sequence: Synthetic polypeptide
  XENP020632 7G8_H0_L0.28_IgG1_PVA_/S267K Heavy Chain

SEQ ID NO: 24642 - protein, 121 aa, Artificial Sequence; identical to SEQ ID NO: 22262
  Description of Artificial Sequence: Synthetic polypeptide
  VH of XENP020632

SEQ ID NO: 24643 - protein, 5 aa, Artificial Sequence
  Description of Artificial Sequence: Synthetic peptide
  XENP020632 vhCDR1
DAWMD

SEQ ID NO: 24644 - protein, 19 aa, Artificial Sequence
  Description of Artificial Sequence: Synthetic peptide
  XENP020632 vhCDR2
EIRTKANNHATYYAESVKG

SEQ ID NO: 24645 - protein, 10 aa, Artificial Sequence
  Description of Artificial Sequence: Synthetic peptide
  XENP020632 vhCDR3
LANWDWYFDV

SEQ ID NO: 24646 - protein, 218 aa, Artificial Sequence
  Description of Artificial Sequence: Synthetic polypeptide
  XENP020632 7G8_H0_L0.28_IgG1_PVA_/S267K Light Chain
DTVLTQSPASLAVSLGQRATISCKASQSVDYYGDSYMNWYQQKPGQPPKLLIYAASNLESGIPARLSGSGSGTDFTLNIHPVEEEDAATYYCQQSNEDPFTFGSGTKLEVKRTVAAPSVFIFPPSDEQLKSGTASVVCLLNNFYPREAKVQWKVDNALQSGNSQESVTEQDSKDSTYSLSSTLTLSKADYEKHKVYACEVTHQGLSSPVTKSFNRGEC

SEQ ID NO: 24647 - protein, 111 aa, Artificial Sequence
  Description of Artificial Sequence: Synthetic polypeptide
  VL of XENP020632
DTVLTQSPASLAVSLGQRATISCKASQSVDYYGDSYMNWYQQKPGQPPKLLIYAASNLESGIPARLSGSGSGTDFTLNIHPVEEEDAATYYCQQSNEDPFTFGSGTKLEVK

SEQ ID NO: 24648 - protein, 15 aa, Artificial Sequence
  Description of Artificial Sequence: Synthetic peptide
  XENP020632 vlCDR1
KASQSVDYYGDSYMN

SEQ ID NO: 24649 - protein, 7 aa, Artificial Sequence
  Description of Artificial Sequence: Synthetic peptide
  XENP020632 vlCDR2
AASNLES

SEQ ID NO: 24650 - protein, 9 aa, Artificial Sequence
  Description of Artificial Sequence: Synthetic peptide
  XENP020632 vlCDR3
QQSNEDPFT

SEQ ID NO: 24651 - protein, 450 aa, Artificial Sequence; identical to SEQ ID NO: 22261
  Description of Artificial Sequence: Synthetic polypeptide
  XENP020633 7G8_H0_L0.29_IgG1_PVA_/S267K Heavy Chain

SEQ ID NO: 24652 - protein, 121 aa, Artificial Sequence; identical to SEQ ID NO: 22262
  Description of Artificial Sequence: Synthetic polypeptide
  VH of XENP020633

SEQ ID NO: 24653 - protein, 5 aa, Artificial Sequence
  Description of Artificial Sequence: Synthetic peptide
  XENP020633 vhCDR1
DAWMD

SEQ ID NO: 24654 - protein, 19 aa, Artificial Sequence
  Description of Artificial Sequence: Synthetic peptide
  XENP020633 vhCDR2
EIRTKANNHATYYAESVKG

SEQ ID NO: 24655 - protein, 10 aa, Artificial Sequence
  Description of Artificial Sequence: Synthetic peptide
  XENP020633 vhCDR3
LANWDWYFDV

SEQ ID NO: 24656 - protein, 218 aa, Artificial Sequence
  Description of Artificial Sequence: Synthetic polypeptide
  XENP020633 7G8_H0_L0.29_IgG1_PVA_/S267K Light Chain
DTVLTQSPASLAVSLGQRATISCKASQSVDYDADSYMNWYQQKPGQPPKLLIYAASNLESGIPARLSGSGSGTDFTLNIHPVEEEDAATYYCQQSNEDPFTFGSGTKLEVKRTVAAPSVFIFPPSDEQLKSGTASVVCLLNNFYPREAKVQWKVDNALQSGNSQESVTEQDSKDSTYSLSSTLTLSKADYEKHKVYACEVTHQGLSSPVTKSFNRGEC

SEQ ID NO: 24657 - protein, 111 aa, Artificial Sequence
  Description of Artificial Sequence: Synthetic polypeptide
  VL of XENP020633
DTVLTQSPASLAVSLGQRATISCKASQSVDYDADSYMNWYQQKPGQPPKLLIYAASNLESGIPARLSGSGSGTDFTLNIHPVEEEDAATYYCQQSNEDPFTFGSGTKLEVK

SEQ ID NO: 24658 - protein, 15 aa, Artificial Sequence
  Description of Artificial Sequence: Synthetic peptide
  XENP020633 vlCDR1
KASQSVDYDADSYMN

SEQ ID NO: 24659 - protein, 7 aa, Artificial Sequence
  Description of Artificial Sequence: Synthetic peptide
  XENP020633 vlCDR2
AASNLES

SEQ ID NO: 24660 - protein, 9 aa, Artificial Sequence
  Description of Artificial Sequence: Synthetic peptide
  XENP020633 vlCDR3
QQSNEDPFT

SEQ ID NO: 24661 - protein, 450 aa, Artificial Sequence; identical to SEQ ID NO: 22261
  Description of Artificial Sequence: Synthetic polypeptide
  XENP020634 7G8_H0_L0.30_IgG1_PVA_/S267K Heavy Chain

SEQ ID NO: 24662 - protein, 121 aa, Artificial Sequence; identical to SEQ ID NO: 22262
  Description of Artificial Sequence: Synthetic polypeptide
  VH of XENP020634

SEQ ID NO: 24663 - protein, 5 aa, Artificial Sequence
  Description of Artificial Sequence: Synthetic peptide
  XENP020634 vhCDR1
DAWMD

SEQ ID NO: 24664 - protein, 19 aa, Artificial Sequence
  Description of Artificial Sequence: Synthetic peptide
  XENP020634 vhCDR2
EIRTKANNHATYYAESVKG

SEQ ID NO: 24665 - protein, 10 aa, Artificial Sequence
  Description of Artificial Sequence: Synthetic peptide
  XENP020634 vhCDR3
LANWDWYFDV

SEQ ID NO: 24666 - protein, 218 aa, Artificial Sequence
  Description of Artificial Sequence: Synthetic polypeptide
  XENP020634 7G8_H0_L0.30_IgG1_PVA_/S267K Light Chain
DTVLTQSPASLAVSLGQRATISCKASQSVDYDSDSYMNWYQQKPGQPPKLLIYAASNLESGIPARLSGSGSGTDFTLNIHPVEEEDAATYYCQQSNEDPFTFGSGTKLEVKRTVAAPSVFIFPPSDEQLKSGTASVVCLLNNFYPREAKVQWKVDNALQSGNSQESVTEQDSKDSTYSLSSTLTLSKADYEKHKVYACEVTHQGLSSPVTKSFNRGEC

SEQ ID NO: 24667 - protein, 111 aa, Artificial Sequence
  Description of Artificial Sequence: Synthetic polypeptide
  VL of XENP020634
DTVLTQSPASLAVSLGQRATISCKASQSVDYDSDSYMNWYQQKPGQPPKLLIYAASNLESGIPARLSGSGSGTDFTLNIHPVEEEDAATYYCQQSNEDPFTFGSGTKLEVK

SEQ ID NO: 24668 - protein, 15 aa, Artificial Sequence
  Description of Artificial Sequence: Synthetic peptide
  XENP020634 vlCDR1
KASQSVDYDSDSYMN

SEQ ID NO: 24669 - protein, 7 aa, Artificial Sequence
  Description of Artificial Sequence: Synthetic peptide
  XENP020634 vlCDR2
AASNLES

SEQ ID NO: 24670 - protein, 9 aa, Artificial Sequence
  Description of Artificial Sequence: Synthetic peptide
  XENP020634 vlCDR3
QQSNEDPFT

SEQ ID NO: 24671 - protein, 450 aa, Artificial Sequence; identical to SEQ ID NO: 22261
  Description of Artificial Sequence: Synthetic polypeptide
  XENP020635 7G8_H0_L0.31_IgG1_PVA_/S267K Heavy Chain

SEQ ID NO: 24672 - protein, 121 aa, Artificial Sequence; identical to SEQ ID NO: 22262
  Description of Artificial Sequence: Synthetic polypeptide
  VH of XENP020635

SEQ ID NO: 24673 - protein, 5 aa, Artificial Sequence
  Description of Artificial Sequence: Synthetic peptide
  XENP020635 vhCDR1
DAWMD

SEQ ID NO: 24674 - protein, 19 aa, Artificial Sequence
  Description of Artificial Sequence: Synthetic peptide
  XENP020635 vhCDR2
EIRTKANNHATYYAESVKG

SEQ ID NO: 24675 - protein, 10 aa, Artificial Sequence
  Description of Artificial Sequence: Synthetic peptide
  XENP020635 vhCDR3
LANWDWYFDV

SEQ ID NO: 24676 - protein, 218 aa, Artificial Sequence
  Description of Artificial Sequence: Synthetic polypeptide
  XENP020635 7G8_H0_L0.31_IgG1_PVA_/S267K Light Chain
DTVLTQSPASLAVSLGQRATISCKASQSVDYDTDSYMNWYQQKPGQPPKLLIYAASNLESGIPARLSGSGSGTDFTLNIHPVEEEDAATYYCQQSNEDPFTFGSGTKLEVKRTVAAPSVFIFPPSDEQLKSGTASVVCLLNNFYPREAKVQWKVDNALQSGNSQESVTEQDSKDSTYSLSSTLTLSKADYEKHKVYACEVTHQGLSSPVTKSFNRGEC

SEQ ID NO: 24677 - protein, 111 aa, Artificial Sequence
  Description of Artificial Sequence: Synthetic polypeptide
  VL of XENP020635
DTVLTQSPASLAVSLGQRATISCKASQSVDYDTDSYMNWYQQKPGQPPKLLIYAASNLESGIPARLSGSGSGTDFTLNIHPVEEEDAATYYCQQSNEDPFTFGSGTKLEVK

SEQ ID NO: 24678 - protein, 15 aa, Artificial Sequence
  Description of Artificial Sequence: Synthetic peptide
  XENP020635 vlCDR1
KASQSVDYDTDSYMN

SEQ ID NO: 24679 - protein, 7 aa, Artificial Sequence
  Description of Artificial Sequence: Synthetic peptide
  XENP020635 vlCDR2
AASNLES

SEQ ID NO: 24680 - protein, 9 aa, Artificial Sequence
  Description of Artificial Sequence: Synthetic peptide
  XENP020635 vlCDR3
QQSNEDPFT

SEQ ID NO: 24681 - protein, 450 aa, Artificial Sequence; identical to SEQ ID NO: 22261
  Description of Artificial Sequence: Synthetic polypeptide
  XENP020636 7G8_H0_L0.32_IgG1_PVA_/S267K Heavy Chain

SEQ ID NO: 24682 - protein, 121 aa, Artificial Sequence; identical to SEQ ID NO: 22262
  Description of Artificial Sequence: Synthetic polypeptide
  VH of XENP020636

SEQ ID NO: 24683 - protein, 5 aa, Artificial Sequence
  Description of Artificial Sequence: Synthetic peptide
  XENP020636 vhCDR1
DAWMD

SEQ ID NO: 24684 - protein, 19 aa, Artificial Sequence
  Description of Artificial Sequence: Synthetic peptide
  XENP020636 vhCDR2
EIRTKANNHATYYAESVKG

SEQ ID NO: 24685 - protein, 10 aa, Artificial Sequence
  Description of Artificial Sequence: Synthetic peptide
  XENP020636 vhCDR3
LANWDWYFDV

SEQ ID NO: 24686 - protein, 218 aa, Artificial Sequence
  Description of Artificial Sequence: Synthetic polypeptide
  XENP020636 7G8_H0_L0.32_IgG1_PVA_/S267K Light Chain
DTVLTQSPASLAVSLGQRATISCKASQSVDYDQDSYMNWYQQKPGQPPKLLIYAASNLESGIPARLSGSGSGTDFTLNIHPVEEEDAATYYCQQSNEDPFTFGSGTKLEVKRTVAAPSVFIFPPSDEQLKSGTASVVCLLNNFYPREAKVQWKVDNALQSGNSQESVTEQDSKDSTYSLSSTLTLSKADYEKHKVYACEVTHQGLSSPVTKSFNRGEC

SEQ ID NO: 24687 - protein, 111 aa, Artificial Sequence
  Description of Artificial Sequence: Synthetic polypeptide
  VL of XENP020636
DTVLTQSPASLAVSLGQRATISCKASQSVDYDQDSYMNWYQQKPGQPPKLLIYAASNLESGIPARLSGSGSGTDFTLNIHPVEEEDAATYYCQQSNEDPFTFGSGTKLEVK

SEQ ID NO: 24688 - protein, 15 aa, Artificial Sequence
  Description of Artificial Sequence: Synthetic peptide
  XENP020636 vlCDR1
KASQSVDYDQDSYMN

SEQ ID NO: 24689 - protein, 7 aa, Artificial Sequence
  Description of Artificial Sequence: Synthetic peptide
  XENP020636 vlCDR2
AASNLES

SEQ ID NO: 24690 - protein, 9 aa, Artificial Sequence
  Description of Artificial Sequence: Synthetic peptide
  XENP020636 vlCDR3
QQSNEDPFT

SEQ ID NO: 24691 - protein, 450 aa, Artificial Sequence; identical to SEQ ID NO: 22261
  Description of Artificial Sequence: Synthetic polypeptide
  XENP020637 7G8_H0_L0.33_IgG1_PVA_/S267K Heavy Chain

SEQ ID NO: 24692 - protein, 121 aa, Artificial Sequence; identical to SEQ ID NO: 22262
  Description of Artificial Sequence: Synthetic polypeptide
  VH of XENP020637

SEQ ID NO: 24693 - protein, 5 aa, Artificial Sequence
  Description of Artificial Sequence: Synthetic peptide
  XENP020637 vhCDR1
DAWMD

SEQ ID NO: 24694 - protein, 19 aa, Artificial Sequence
  Description of Artificial Sequence: Synthetic peptide
  XENP020637 vhCDR2
EIRTKANNHATYYAESVKG

SEQ ID NO: 24695 - protein, 10 aa, Artificial Sequence
  Description of Artificial Sequence: Synthetic peptide
  XENP020637 vhCDR3
LANWDWYFDV

SEQ ID NO: 24696 - protein, 218 aa, Artificial Sequence
  Description of Artificial Sequence: Synthetic polypeptide
  XENP020637 7G8_H0_L0.33_IgG1_PVA_/S267K Light Chain
DTVLTQSPASLAVSLGQRATISCKASQSVDYDHDSYMNWYQQKPGQPPKLLIYAASNLESGIPARLSGSGSGTDFTLNIHPVEEEDAATYYCQQSNEDPFTFGSGTKLEVKRTVAAPSVFIFPPSDEQLKSGTASVVCLLNNFYPREAKVQWKVDNALQSGNSQESVTEQDSKDSTYSLSSTLTLSKADYEKHKVYACEVTHQGLSSPVTKSFNRGEC

SEQ ID NO: 24697 - protein, 111 aa, Artificial Sequence
  Description of Artificial Sequence: Synthetic polypeptide
  VL of XENP020637
DTVLTQSPASLAVSLGQRATISCKASQSVDYDHDSYMNWYQQKPGQPPKLLIYAASNLESGIPARLSGSGSGTDFTLNIHPVEEEDAATYYCQQSNEDPFTFGSGTKLEVK

SEQ ID NO: 24698 - protein, 15 aa, Artificial Sequence
  Description of Artificial Sequence: Synthetic peptide
  XENP020637 vlCDR1
KASQSVDYDHDSYMN

SEQ ID NO: 24699 - protein, 7 aa, Artificial Sequence
  Description of Artificial Sequence: Synthetic peptide
  XENP020637 vlCDR2
AASNLES

SEQ ID NO: 24700 - protein, 9 aa, Artificial Sequence
  Description of Artificial Sequence: Synthetic peptide
  XENP020637 vlCDR3
QQSNEDPFT

SEQ ID NO: 24701 - protein, 450 aa, Artificial Sequence; identical to SEQ ID NO: 22261
  Description of Artificial Sequence: Synthetic polypeptide
  XENP020638 7G8_H0_L0.34_IgG1_PVA_/S267K Heavy Chain

SEQ ID NO: 24702 - protein, 121 aa, Artificial Sequence; identical to SEQ ID NO: 22262
  Description of Artificial Sequence: Synthetic polypeptide
  VH of XENP020638

SEQ ID NO: 24703 - protein, 5 aa, Artificial Sequence
  Description of Artificial Sequence: Synthetic peptide
  XENP020638 vhCDR1
DAWMD

SEQ ID NO: 24704 - protein, 19 aa, Artificial Sequence
  Description of Artificial Sequence: Synthetic peptide
  XENP020638 vhCDR2
EIRTKANNHATYYAESVKG

SEQ ID NO: 24705 - protein, 10 aa, Artificial Sequence
  Description of Artificial Sequence: Synthetic peptide
  XENP020638 vhCDR3
LANWDWYFDV

SEQ ID NO: 24706 - protein, 218 aa, Artificial Sequence
  Description of Artificial Sequence: Synthetic polypeptide
  XENP020638 7G8_H0_L0.34_IgG1_PVA_/S267K Light Chain
DTVLTQSPASLAVSLGQRATISCKASQSVDYDDDSYMNWYQQKPGQPPKLLIYAASNLESGIPARLSGSGSGTDFTLNIHPVEEEDAATYYCQQSNEDPFTFGSGTKLEVKRTVAAPSVFIFPPSDEQLKSGTASVVCLLNNFYPREAKVQWKVDNALQSGNSQESVTEQDSKDSTYSLSSTLTLSKADYEKHKVYACEVTHQGLSSPVTKSFNRGEC

SEQ ID NO: 24707 - protein, 111 aa, Artificial Sequence
  Description of Artificial Sequence: Synthetic polypeptide
  VL of XENP020638
DTVLTQSPASLAVSLGQRATISCKASQSVDYDDDSYMNWYQQKPGQPPKLLIYAASNLESGIPARLSGSGSGTDFTLNIHPVEEEDAATYYCQQSNEDPFTFGSGTKLEVK

SEQ ID NO: 24708 - protein, 15 aa, Artificial Sequence
  Description of Artificial Sequence: Synthetic peptide
  XENP020638 vlCDR1
KASQSVDYDDDSYMN

SEQ ID NO: 24709 - protein, 7 aa, Artificial Sequence
  Description of Artificial Sequence: Synthetic peptide
  XENP020638 vlCDR2
AASNLES

SEQ ID NO: 24710 - protein, 9 aa, Artificial Sequence
  Description of Artificial Sequence: Synthetic peptide
  XENP020638 vlCDR3
QQSNEDPFT

SEQ ID NO: 24711 - protein, 450 aa, Artificial Sequence; identical to SEQ ID NO: 22261
  Description of Artificial Sequence: Synthetic polypeptide
  XENP020639 7G8_H0_L0.35_IgG1_PVA_/S267K Heavy Chain

SEQ ID NO: 24712 - protein, 121 aa, Artificial Sequence; identical to SEQ ID NO: 22262
  Description of Artificial Sequence: Synthetic polypeptide
  VH of XENP020639

SEQ ID NO: 24713 - protein, 5 aa, Artificial Sequence
  Description of Artificial Sequence: Synthetic peptide
  XENP020639 vhCDR1
DAWMD

SEQ ID NO: 24714 - protein, 19 aa, Artificial Sequence
  Description of Artificial Sequence: Synthetic peptide
  XENP020639 vhCDR2
EIRTKANNHATYYAESVKG

SEQ ID NO: 24715 - protein, 10 aa, Artificial Sequence
  Description of Artificial Sequence: Synthetic peptide
  XENP020639 vhCDR3
LANWDWYFDV

SEQ ID NO: 24716 - protein, 218 aa, Artificial Sequence
  Description of Artificial Sequence: Synthetic polypeptide
  XENP020639 7G8_H0_L0.35_IgG1_PVA_/S267K Light Chain
DTVLTQSPASLAVSLGQRATISCKASQSVDYDKDSYMNWYQQKPGQPPKLLIYAASNLESGIPARLSGSGSGTDFTLNIHPVEEEDAATYYCQQSNEDPFTFGSGTKLEVKRTVAAPSVFIFPPSDEQLKSGTASVVCLLNNFYPREAKVQWKVDNALQSGNSQESVTEQDSKDSTYSLSSTLTLSKADYEKHKVYACEVTHQGLSSPVTKSFNRGEC

SEQ ID NO: 24717 - protein, 111 aa, Artificial Sequence
  Description of Artificial Sequence: Synthetic polypeptide
  VL of XENP020639
DTVLTQSPASLAVSLGQRATISCKASQSVDYDKDSYMNWYQQKPGQPPKLLIYAASNLESGIPARLSGSGSGTDFTLNIHPVEEEDAATYYCQQSNEDPFTFGSGTKLEVK

SEQ ID NO: 24718 - protein, 15 aa, Artificial Sequence
  Description of Artificial Sequence: Synthetic peptide
  XENP020639 vlCDR1
KASQSVDYDKDSYMN

SEQ ID NO: 24719 - protein, 7 aa, Artificial Sequence
  Description of Artificial Sequence: Synthetic peptide
  XENP020639 vlCDR2
AASNLES

SEQ ID NO: 24720 - protein, 9 aa, Artificial Sequence
  Description of Artificial Sequence: Synthetic peptide
  XENP020639 vlCDR3
QQSNEDPFT

SEQ ID NO: 24721 - protein, 450 aa, Artificial Sequence; identical to SEQ ID NO: 22261
  Description of Artificial Sequence: Synthetic polypeptide
  XENP020640 7G8_H0_L0.36_IgG1_PVA_/S267K Heavy Chain

SEQ ID NO: 24722 - protein, 121 aa, Artificial Sequence; identical to SEQ ID NO: 22262
  Description of Artificial Sequence: Synthetic polypeptide
  VH of XENP020640

SEQ ID NO: 24723 - protein, 5 aa, Artificial Sequence
  Description of Artificial Sequence: Synthetic peptide
  XENP020640 vhCDR1
DAWMD

SEQ ID NO: 24724 - protein, 19 aa, Artificial Sequence
  Description of Artificial Sequence: Synthetic peptide
  XENP020640 vhCDR2
EIRTKANNHATYYAESVKG

SEQ ID NO: 24725 - protein, 10 aa, Artificial Sequence
  Description of Artificial Sequence: Synthetic peptide
  XENP020640 vhCDR3
LANWDWYFDV

SEQ ID NO: 24726 - protein, 218 aa, Artificial Sequence
  Description of Artificial Sequence: Synthetic polypeptide
  XENP020640 7G8_H0_L0.36_IgG1_PVA_/S267K Light Chain
DTVLTQSPASLAVSLGQRATISCKASQSVDYDLDSYMNWYQQKPGQPPKLLIYAASNLESGIPARLSGSGSGTDFTLNIHPVEEEDAATYYCQQSNEDPFTFGSGTKLEVKRTVAAPSVFIFPPSDEQLKSGTASVVCLLNNFYPREAKVQWKVDNALQSGNSQESVTEQDSKDSTYSLSSTLTLSKADYEKHKVYACEVTHQGLSSPVTKSFNRGEC

SEQ ID NO: 24727 - protein, 111 aa, Artificial Sequence
  Description of Artificial Sequence: Synthetic polypeptide
  VL of XENP020640
DTVLTQSPASLAVSLGQRATISCKASQSVDYDLDSYMNWYQQKPGQPPKLLIYAASNLESGIPARLSGSGSGTDFTLNIHPVEEEDAATYYCQQSNEDPFTFGSGTKLEVK

SEQ ID NO: 24728 - protein, 15 aa, Artificial Sequence
  Description of Artificial Sequence: Synthetic peptide
  XENP020640 vlCDR1
KASQSVDYDLDSYMN

SEQ ID NO: 24729 - protein, 7 aa, Artificial Sequence
  Description of Artificial Sequence: Synthetic peptide
  XENP020640 vlCDR2
AASNLES

SEQ ID NO: 24730 - protein, 9 aa, Artificial Sequence
  Description of Artificial Sequence: Synthetic peptide
  XENP020640 vlCDR3
QQSNEDPFT

SEQ ID NO: 24731 - protein, 450 aa, Artificial Sequence; identical to SEQ ID NO: 22261
  Description of Artificial Sequence: Synthetic polypeptide
  XENP020641 7G8_H0_L0.37_IgG1_PVA_/S267K Heavy Chain

SEQ ID NO: 24732 - protein, 121 aa, Artificial Sequence; identical to SEQ ID NO: 22262
  Description of Artificial Sequence: Synthetic polypeptide
  VH of XENP020641

SEQ ID NO: 24733 - protein, 5 aa, Artificial Sequence
  Description of Artificial Sequence: Synthetic peptide
  XENP020641 vhCDR1
DAWMD

SEQ ID NO: 24734 - protein, 19 aa, Artificial Sequence
  Description of Artificial Sequence: Synthetic peptide
  XENP020641 vhCDR2
EIRTKANNHATYYAESVKG

SEQ ID NO: 24735 - protein, 10 aa, Artificial Sequence
  Description of Artificial Sequence: Synthetic peptide
  XENP020641 vhCDR3
LANWDWYFDV

SEQ ID NO: 24736 - protein, 218 aa, Artificial Sequence
  Description of Artificial Sequence: Synthetic polypeptide
  XENP020641 7G8_H0_L0.37_IgG1_PVA_/S267K Light Chain
DTVLTQSPASLAVSLGQRATISCKASQSVDYDYDSYMNWYQQKPGQPPKLLIYAASNLESGIPARLSGSGSGTDFTLNIHPVEEEDAATYYCQQSNEDPFTFGSGTKLEVKRTVAAPSVFIFPPSDEQLKSGTASVVCLLNNFYPREAKVQWKVDNALQSGNSQESVTEQDSKDSTYSLSSTLTLSKADYEKHKVYACEVTHQGLSSPVTKSFNRGEC

SEQ ID NO: 24737 - protein, 111 aa, Artificial Sequence
  Description of Artificial Sequence: Synthetic polypeptide
  VL of XENP020641
DTVLTQSPASLAVSLGQRATISCKASQSVDYDYDSYMNWYQQKPGQPPKLLIYAASNLESGIPARLSGSGSGTDFTLNIHPVEEEDAATYYCQQSNEDPFTFGSGTKLEVK

SEQ ID NO: 24738 - protein, 15 aa, Artificial Sequence
  Description of Artificial Sequence: Synthetic peptide
  XENP020641 vlCDR1
KASQSVDYDYDSYMN

SEQ ID NO: 24739 - protein, 7 aa, Artificial Sequence
  Description of Artificial Sequence: Synthetic peptide
  XENP020641 vlCDR2
AASNLES

SEQ ID NO: 24740 - protein, 9 aa, Artificial Sequence
  Description of Artificial Sequence: Synthetic peptide
  XENP020641 vlCDR3
QQSNEDPFT

SEQ ID NO: 24741 - protein, 450 aa, Artificial Sequence; identical to SEQ ID NO: 22261
  Description of Artificial Sequence: Synthetic polypeptide
  XENP020642 7G8_H0_L0.38_IgG1_PVA_/S267K Heavy Chain

SEQ ID NO: 24742 - protein, 121 aa, Artificial Sequence; identical to SEQ ID NO: 22262
  Description of Artificial Sequence: Synthetic polypeptide
  VH of XENP020642

SEQ ID NO: 24743 - protein, 5 aa, Artificial Sequence
  Description of Artificial Sequence: Synthetic peptide
  XENP020642 vhCDR1
DAWMD

SEQ ID NO: 24744 - protein, 19 aa, Artificial Sequence
  Description of Artificial Sequence: Synthetic peptide
  XENP020642 vhCDR2
EIRTKANNHATYYAESVKG

SEQ ID NO: 24745 - protein, 10 aa, Artificial Sequence
  Description of Artificial Sequence: Synthetic peptide
  XENP020642 vhCDR3
LANWDWYFDV

SEQ ID NO: 24746 - protein, 218 aa, Artificial Sequence
  Description of Artificial Sequence: Synthetic polypeptide
  XENP020642 7G8_H0_L0.38_IgG1_PVA_/S267K Light Chain
DTVLTQSPASLAVSLGQRATISCKASQSVDYDGNSYMNWYQQKPGQPPKLLIYAASNLESGIPARLSGSGSGTDFTLNIHPVEEEDAATYYCQQSNEDPFTFGSGTKLEVKRTVAAPSVFIFPPSDEQLKSGTASVVCLLNNFYPREAKVQWKVDNALQSGNSQESVTEQDSKDSTYSLSSTLTLSKADYEKHKVYACEVTHQGLSSPVTKSFNRGEC

SEQ ID NO: 24747 - protein, 111 aa, Artificial Sequence
  Description of Artificial Sequence: Synthetic polypeptide
  VL of XENP020642
DTVLTQSPASLAVSLGQRATISCKASQSVDYDGNSYMNWYQQKPGQPPKLLIYAASNLESGIPARLSGSGSGTDFTLNIHPVEEEDAATYYCQQSNEDPFTFGSGTKLEVK

SEQ ID NO: 24748 - protein, 15 aa, Artificial Sequence
  Description of Artificial Sequence: Synthetic peptide
  XENP020642 vlCDR1
KASQSVDYDGNSYMN

SEQ ID NO: 24749 - protein, 7 aa, Artificial Sequence
  Description of Artificial Sequence: Synthetic peptide
  XENP020642 vlCDR2
AASNLES

SEQ ID NO: 24750 - protein, 9 aa, Artificial Sequence
  Description of Artificial Sequence: Synthetic peptide
  XENP020642 vlCDR3
QQSNEDPFT

SEQ ID NO: 24751 - protein, 450 aa, Artificial Sequence; identical to SEQ ID NO: 22261
  Description of Artificial Sequence: Synthetic polypeptide
  XENP020643 7G8_H0_L0.39_IgG1_PVA_/S267K Heavy Chain

SEQ ID NO: 24752 - protein, 121 aa, Artificial Sequence; identical to SEQ ID NO: 22262
  Description of Artificial Sequence: Synthetic polypeptide
  VH of XENP020643

SEQ ID NO: 24753 - protein, 5 aa, Artificial Sequence
  Description of Artificial Sequence: Synthetic peptide
  XENP020643 vhCDR1
DAWMD

SEQ ID NO: 24754 - protein, 19 aa, Artificial Sequence
  Description of Artificial Sequence: Synthetic peptide
  XENP020643 vhCDR2
EIRTKANNHATYYAESVKG

SEQ ID NO: 24755 - protein, 10 aa, Artificial Sequence
  Description of Artificial Sequence: Synthetic peptide
  XENP020643 vhCDR3
LANWDWYFDV

SEQ ID NO: 24756 - protein, 218 aa, Artificial Sequence
  Description of Artificial Sequence: Synthetic polypeptide
  XENP020643 7G8_H0_L0.39_IgG1_PVA_/S267K Light Chain
DTVLTQSPASLAVSLGQRATISCKASQSVDYDGESYMNWYQQKPGQPPKLLIYAASNLESGIPARLSGSGSGTDFTLNIHPVEEEDAATYYCQQSNEDPFTFGSGTKLEVKRTVAAPSVFIFPPSDEQLKSGTASVVCLLNNFYPREAKVQWKVDNALQSGNSQESVTEQDSKDSTYSLSSTLTLSKADYEKHKVYACEVTHQGLSSPVTKSFNRGEC

SEQ ID NO: 24757 - protein, 111 aa, Artificial Sequence
  Description of Artificial Sequence: Synthetic polypeptide
  VL of XENP020643
DTVLTQSPASLAVSLGQRATISCKASQSVDYDGESYMNWYQQKPGQPPKLLIYAASNLESGIPARLSGSGSGTDFTLNIHPVEEEDAATYYCQQSNEDPFTFGSGTKLEVK

SEQ ID NO: 24758 - protein, 15 aa, Artificial Sequence
  Description of Artificial Sequence: Synthetic peptide
  XENP020643 vlCDR1
KASQSVDYDGESYMN

SEQ ID NO: 24759 - protein, 7 aa, Artificial Sequence
  Description of Artificial Sequence: Synthetic peptide
  XENP020643 vlCDR2
AASNLES

SEQ ID NO: 24760 - protein, 9 aa, Artificial Sequence
  Description of Artificial Sequence: Synthetic peptide
  XENP020643 vlCDR3
QQSNEDPFT

SEQ ID NO: 24761 - protein, 450 aa, Artificial Sequence; identical to SEQ ID NO: 22261
  Description of Artificial Sequence: Synthetic polypeptide
  XENP020644 7G8_H0_L0.40_IgG1_PVA_/S267K Heavy Chain

SEQ ID NO: 24762 - protein, 121 aa, Artificial Sequence; identical to SEQ ID NO: 22262
  Description of Artificial Sequence: Synthetic polypeptide
  VH of XENP020644

SEQ ID NO: 24763 - protein, 5 aa, Artificial Sequence
  Description of Artificial Sequence: Synthetic peptide
  XENP020644 vhCDR1
DAWMD

SEQ ID NO: 24764 - protein, 19 aa, Artificial Sequence
  Description of Artificial Sequence: Synthetic peptide
  XENP020644 vhCDR2
EIRTKANNHATYYAESVKG

SEQ ID NO: 24765 - protein, 10 aa, Artificial Sequence
  Description of Artificial Sequence: Synthetic peptide
  XENP020644 vhCDR3
LANWDWYFDV

SEQ ID NO: 24766 - protein, 218 aa, Artificial Sequence
  Description of Artificial Sequence: Synthetic polypeptide
  XENP020644 7G8_H0_L0.40_IgG1_PVA_/S267K Light Chain
DTVLTQSPASLAVSLGQRATISCKASQSVDYDGHSYMNWYQQKPGQPPKLLIYAASNLESGIPARLSGSGSGTDFTLNIHPVEEEDAATYYCQQSNEDPFTFGSGTKLEVKRTVAAPSVFIFPPSDEQLKSGTASVVCLLNNFYPREAKVQWKVDNALQSGNSQESVTEQDSKDSTYSLSSTLTLSKADYEKHKVYACEVTHQGLSSPVTKSFNRGEC

SEQ ID NO: 24767 - protein, 111 aa, Artificial Sequence
  Description of Artificial Sequence: Synthetic polypeptide
  VL of XENP020644
DTVLTQSPASLAVSLGQRATISCKASQSVDYDGHSYMNWYQQKPGQPPKLLIYAASNLESGIPARLSGSGSGTDFTLNIHPVEEEDAATYYCQQSNEDPFTFGSGTKLEVK

SEQ ID NO: 24768 - protein, 15 aa, Artificial Sequence
  Description of Artificial Sequence: Synthetic peptide
  XENP020644 vlCDR1
KASQSVDYDGHSYMN

SEQ ID NO: 24769 - protein, 7 aa, Artificial Sequence
  Description of Artificial Sequence: Synthetic peptide
  XENP020644 vlCDR2
AASNLES

SEQ ID NO: 24770 - protein, 9 aa, Artificial Sequence
  Description of Artificial Sequence: Synthetic peptide
  XENP020644 vlCDR3
QQSNEDPFT

SEQ ID NO: 24771 - protein, 450 aa, Artificial Sequence; identical to SEQ ID NO: 22261
  Description of Artificial Sequence: Synthetic polypeptide
  XENP020645 7G8_H0_L0.41_IgG1_PVA_/S267K Heavy Chain

SEQ ID NO: 24772 - protein, 121 aa, Artificial Sequence; identical to SEQ ID NO: 22262
  Description of Artificial Sequence: Synthetic polypeptide
  VH of XENP020645

SEQ ID NO: 24773 - protein, 5 aa, Artificial Sequence
  Description of Artificial Sequence: Synthetic peptide
  XENP020645 vhCDR1
DAWMD

SEQ ID NO: 24774 - protein, 19 aa, Artificial Sequence
  Description of Artificial Sequence: Synthetic peptide
  XENP020645 vhCDR2
EIRTKANNHATYYAESVKG

SEQ ID NO: 24775 - protein, 10 aa, Artificial Sequence
  Description of Artificial Sequence: Synthetic peptide
  XENP020645 vhCDR3
LANWDWYFDV

SEQ ID NO: 24776 - protein, 218 aa, Artificial Sequence
  Description of Artificial Sequence: Synthetic polypeptide
  XENP020645 7G8_H0_L0.41_IgG1_PVA_/S267K Light Chain
DTVLTQSPASLAVSLGQRATISCKASQSVDYDGSSYMNWYQQKPGQPPKLLIYAASNLESGIPARLSGSGSGTDFTLNIHPVEEEDAATYYCQQSNEDPFTFGSGTKLEVKRTVAAPSVFIFPPSDEQLKSGTASVVCLLNNFYPREAKVQWKVDNALQSGNSQESVTEQDSKDSTYSLSSTLTLSKADYEKHKVYACEVTHQGLSSPVTKSFNRGEC

SEQ ID NO: 24777 - protein, 111 aa, Artificial Sequence
  Description of Artificial Sequence: Synthetic polypeptide
  VL of XENP020645
DTVLTQSPASLAVSLGQRATISCKASQSVDYDGSSYMNWYQQKPGQPPKLLIYAASNLESGIPARLSGSGSGTDFTLNIHPVEEEDAATYYCQQSNEDPFTFGSGTKLEVK

SEQ ID NO: 24778 - protein, 15 aa, Artificial Sequence
  Description of Artificial Sequence: Synthetic peptide
  XENP020645 vlCDR1
KASQSVDYDGSSYMN

SEQ ID NO: 24779 - protein, 7 aa, Artificial Sequence
  Description of Artificial Sequence: Synthetic peptide
  XENP020645 vlCDR2
AASNLES

SEQ ID NO: 24780 - protein, 9 aa, Artificial Sequence
  Description of Artificial Sequence: Synthetic peptide
  XENP020645 vlCDR3
QQSNEDPFT

SEQ ID NO: 24781 - protein, 450 aa, Artificial Sequence; identical to SEQ ID NO: 22261
  Description of Artificial Sequence: Synthetic polypeptide
  XENP020646 7G8_H0_L0.42_IgG1_PVA_/S267K Heavy Chain

SEQ ID NO: 24782 - protein, 121 aa, Artificial Sequence; identical to SEQ ID NO: 22262
  Description of Artificial Sequence: Synthetic polypeptide
  VH of XENP020646

SEQ ID NO: 24783 - protein, 5 aa, Artificial Sequence
  Description of Artificial Sequence: Synthetic peptide
  XENP020646 vhCDR1
DAWMD

SEQ ID NO: 24784 - protein, 19 aa, Artificial Sequence
  Description of Artificial Sequence: Synthetic peptide
  XENP020646 vhCDR2
EIRTKANNHATYYAESVKG

SEQ ID NO: 24785 - protein, 10 aa, Artificial Sequence
  Description of Artificial Sequence: Synthetic peptide
  XENP020646 vhCDR3
LANWDWYFDV

SEQ ID NO: 24786 - protein, 218 aa, Artificial Sequence
  Description of Artificial Sequence: Synthetic polypeptide
  XENP020646 7G8_H0_L0.42_IgG1_PVA_/S267K Light Chain
DTVLTQSPASLAVSLGQRATISCKASQSVDYDGRSYMNWYQQKPGQPPKLLIYAASNLESGIPARLSGSGSGTDFTLNIHPVEEEDAATYYCQQSNEDPFTFGSGTKLEVKRTVAAPSVFIFPPSDEQLKSGTASVVCLLNNFYPREAKVQWKVDNALQSGNSQESVTEQDSKDSTYSLSSTLTLSKADYEKHKVYACEVTHQGLSSPVTKSFNRGEC

SEQ ID NO: 24787 - protein, 111 aa, Artificial Sequence
  Description of Artificial Sequence: Synthetic polypeptide
  VL of XENP020646
DTVLTQSPASLAVSLGQRATISCKASQSVDYDGRSYMNWYQQKPGQPPKLLIYAASNLESGIPARLSGSGSGTDFTLNIHPVEEEDAATYYCQQSNEDPFTFGSGTKLEVK

SEQ ID NO: 24788 - protein, 15 aa, Artificial Sequence
  Description of Artificial Sequence: Synthetic peptide
  XENP020646 vlCDR1
KASQSVDYDGRSYMN

SEQ ID NO: 24789 - protein, 7 aa, Artificial Sequence
  Description of Artificial Sequence: Synthetic peptide
  XENP020646 vlCDR2
AASNLES

SEQ ID NO: 24790 - protein, 9 aa, Artificial Sequence
  Description of Artificial Sequence: Synthetic peptide
  XENP020646 vlCDR3
QQSNEDPFT

SEQ ID NO: 24791 - protein, 450 aa, Artificial Sequence; identical to SEQ ID NO: 22261
  Description of Artificial Sequence: Synthetic polypeptide
  XENP020647 7G8_H0_L0.43_IgG1_PVA_/S267K Heavy Chain

SEQ ID NO: 24792 - protein, 121 aa, Artificial Sequence; identical to SEQ ID NO: 22262
  Description of Artificial Sequence: Synthetic polypeptide
  VH of XENP020647

SEQ ID NO: 24793 - protein, 5 aa, Artificial Sequence
  Description of Artificial Sequence: Synthetic peptide
  XENP020647 vhCDR1
DAWMD

SEQ ID NO: 24794 - protein, 19 aa, Artificial Sequence
  Description of Artificial Sequence: Synthetic peptide
  XENP020647 vhCDR2
EIRTKANNHATYYAESVKG

SEQ ID NO: 24795 - protein, 10 aa, Artificial Sequence
  Description of Artificial Sequence: Synthetic peptide
  XENP020647 vhCDR3
LANWDWYFDV

SEQ ID NO: 24796 - protein, 218 aa, Artificial Sequence
  Description of Artificial Sequence: Synthetic polypeptide
  XENP020647 7G8_H0_L0.43_IgG1_PVA_/S267K Light Chain
DTVLTQSPASLAVSLGQRATISCKASQSVDYDGLSYMNWYQQKPGQPPKLLIYAASNLESGIPARLSGSGSGTDFTLNIHPVEEEDAATYYCQQSNEDPFTFGSGTKLEVKRTVAAPSVFIFPPSDEQLKSGTASVVCLLNNFYPREAKVQWKVDNALQSGNSQESVTEQDSKDSTYSLSSTLTLSKADYEKHKVYACEVTHQGLSSPVTKSFNRGEC

SEQ ID NO: 24797 - protein, 111 aa, Artificial Sequence
  Description of Artificial Sequence: Synthetic polypeptide
  VL of XENP020647
DTVLTQSPASLAVSLGQRATISCKASQSVDYDGLSYMNWYQQKPGQPPKLLIYAASNLESGIPARLSGSGSGTDFTLNIHPVEEEDAATYYCQQSNEDPFTFGSGTKLEVK

SEQ ID NO: 24798 - protein, 15 aa, Artificial Sequence
  Description of Artificial Sequence: Synthetic peptide
  XENP020647 vlCDR1
KASQSVDYDGLSYMN

SEQ ID NO: 24799 - protein, 7 aa, Artificial Sequence
  Description of Artificial Sequence: Synthetic peptide
  XENP020647 vlCDR2
AASNLES

SEQ ID NO: 24800 - protein, 9 aa, Artificial Sequence
  Description of Artificial Sequence: Synthetic peptide
  XENP020647 vlCDR3
QQSNEDPFT

SEQ ID NO: 24801 - protein, 450 aa, Artificial Sequence; identical to SEQ ID NO: 22261
  Description of Artificial Sequence: Synthetic polypeptide
  XENP020648 7G8_H0_L0.44_IgG1_PVA_/S267K Heavy Chain

SEQ ID NO: 24802 - protein, 121 aa, Artificial Sequence; identical to SEQ ID NO: 22262
  Description of Artificial Sequence: Synthetic polypeptide
  VH of XENP020648

SEQ ID NO: 24803 - protein, 5 aa, Artificial Sequence
  Description of Artificial Sequence: Synthetic peptide
  XENP020648 vhCDR1
DAWMD

SEQ ID NO: 24804 - protein, 19 aa, Artificial Sequence
  Description of Artificial Sequence: Synthetic peptide
  XENP020648 vhCDR2
EIRTKANNHATYYAESVKG

SEQ ID NO: 24805 - protein, 10 aa, Artificial Sequence
  Description of Artificial Sequence: Synthetic peptide
  XENP020648 vhCDR3
LANWDWYFDV

SEQ ID NO: 24806 - protein, 218 aa, Artificial Sequence
  Description of Artificial Sequence: Synthetic polypeptide
  XENP020648 7G8_H0_L0.44_IgG1_PVA_/S267K Light Chain
DTVLTQSPASLAVSLGQRATISCKASQSVDYDGTSYMNWYQQKPGQPPKLLIYAASNLESGIPARLSGSGSGTDFTLNIHPVEEEDAATYYCQQSNEDPFTFGSGTKLEVKRTVAAPSVFIFPPSDEQLKSGTASVVCLLNNFYPREAKVQWKVDNALQSGNSQESVTEQDSKDSTYSLSSTLTLSKADYEKHKVYACEVTHQGLSSPVTKSFNRGEC

SEQ ID NO: 24807 - protein, 111 aa, Artificial Sequence
  Description of Artificial Sequence: Synthetic polypeptide
  VL of XENP020648
DTVLTQSPASLAVSLGQRATISCKASQSVDYDGTSYMNWYQQKPGQPPKLLIYAASNLESGIPARLSGSGSGTDFTLNIHPVEEEDAATYYCQQSNEDPFTFGSGTKLEVK

SEQ ID NO: 24808 - protein, 15 aa, Artificial Sequence
  Description of Artificial Sequence: Synthetic peptide
  XENP020648 vlCDR1
KASQSVDYDGTSYMN

SEQ ID NO: 24809 - protein, 7 aa, Artificial Sequence
  Description of Artificial Sequence: Synthetic peptide
  XENP020648 vlCDR2
AASNLES

SEQ ID NO: 24810 - protein, 9 aa, Artificial Sequence
  Description of Artificial Sequence: Synthetic peptide
  XENP020648 vlCDR3
QQSNEDPFT

SEQ ID NO: 24811 - protein, 450 aa, Artificial Sequence; identical to SEQ ID NO: 22261
  Description of Artificial Sequence: Synthetic polypeptide
  XENP020649 7G8_H0_L0.45_IgG1_PVA_/S267K Heavy Chain

SEQ ID NO: 24812 - protein, 121 aa, Artificial Sequence; identical to SEQ ID NO: 22262
  Description of Artificial Sequence: Synthetic polypeptide
  VH of XENP020649

SEQ ID NO: 24813 - protein, 5 aa, Artificial Sequence
  Description of Artificial Sequence: Synthetic peptide
  XENP020649 vhCDR1
DAWMD

SEQ ID NO: 24814 - protein, 19 aa, Artificial Sequence
  Description of Artificial Sequence: Synthetic peptide
  XENP020649 vhCDR2
EIRTKANNHATYYAESVKG

SEQ ID NO: 24815 - protein, 10 aa, Artificial Sequence
  Description of Artificial Sequence: Synthetic peptide
  XENP020649 vhCDR3
LANWDWYFDV

SEQ ID NO: 24816 - protein, 218 aa, Artificial Sequence
  Description of Artificial Sequence: Synthetic polypeptide
  XENP020649 7G8_H0_L0.45_IgG1_PVA_/S267K Light Chain
DTVLTQSPASLAVSLGQRATISCKASQSVDYDGGSYMNWYQQKPGQPPKLLIYAASNLESGIPARLSGSGSGTDFTLNIHPVEEEDAATYYCQQSNEDPFTFGSGTKLEVKRTVAAPSVFIFPPSDEQLKSGTASVVCLLNNFYPREAKVQWKVDNALQSGNSQESVTEQDSKDSTYSLSSTLTLSKADYEKHKVYACEVTHQGLSSPVTKSFNRGEC

SEQ ID NO: 24817 - protein, 111 aa, Artificial Sequence
  Description of Artificial Sequence: Synthetic polypeptide
  VL of XENP020649
DTVLTQSPASLAVSLGQRATISCKASQSVDYDGGSYMNWYQQKPGQPPKLLIYAASNLESGIPARLSGSGSGTDFTLNIHPVEEEDAATYYCQQSNEDPFTFGSGTKLEVK

SEQ ID NO: 24818 - protein, 15 aa, Artificial Sequence
  Description of Artificial Sequence: Synthetic peptide
  XENP020649 vlCDR1
KASQSVDYDGGSYMN

SEQ ID NO: 24819 - protein, 7 aa, Artificial Sequence
  Description of Artificial Sequence: Synthetic peptide
  XENP020649 vlCDR2
AASNLES

SEQ ID NO: 24820 - protein, 9 aa, Artificial Sequence
  Description of Artificial Sequence: Synthetic peptide
  XENP020649 vlCDR3
QQSNEDPFT

SEQ ID NO: 24821 - protein, 450 aa, Artificial Sequence; identical to SEQ ID NO: 22261
  Description of Artificial Sequence: Synthetic polypeptide
  XENP020650 7G8_H0_L0.46_IgG1_PVA_/S267K Heavy Chain

SEQ ID NO: 24822 - protein, 121 aa, Artificial Sequence; identical to SEQ ID NO: 22262
  Description of Artificial Sequence: Synthetic polypeptide
  VH of XENP020650

SEQ ID NO: 24823 - protein, 5 aa, Artificial Sequence
  Description of Artificial Sequence: Synthetic peptide
  XENP020650 vhCDR1
DAWMD

SEQ ID NO: 24824 - protein, 19 aa, Artificial Sequence
  Description of Artificial Sequence: Synthetic peptide
  XENP020650 vhCDR2
EIRTKANNHATYYAESVKG

SEQ ID NO: 24825 - protein, 10 aa, Artificial Sequence
  Description of Artificial Sequence: Synthetic peptide
  XENP020650 vhCDR3
LANWDWYFDV

SEQ ID NO: 24826 - protein, 218 aa, Artificial Sequence
  Description of Artificial Sequence: Synthetic polypeptide
  XENP020650 7G8_H0_L0.46_IgG1_PVA_/S267K Light Chain
DTVLTQSPASLAVSLGQRATISCKASQSVDYDGYSYMNWYQQKPGQPPKLLIYAASNLESGIPARLSGSGSGTDFTLNIHPVEEEDAATYYCQQSNEDPFTFGSGTKLEVKRTVAAPSVFIFPPSDEQLKSGTASVVCLLNNFYPREAKVQWKVDNALQSGNSQESVTEQDSKDSTYSLSSTLTLSKADYEKHKVYACEVTHQGLSSPVTKSFNRGEC

SEQ ID NO: 24827 - protein, 111 aa, Artificial Sequence
  Description of Artificial Sequence: Synthetic polypeptide
  VL of XENP020650
DTVLTQSPASLAVSLGQRATISCKASQSVDYDGYSYMNWYQQKPGQPPKLLIYAASNLESGIPARLSGSGSGTDFTLNIHPVEEEDAATYYCQQSNEDPFTFGSGTKLEVK

SEQ ID NO: 24828 - protein, 15 aa, Artificial Sequence
  Description of Artificial Sequence: Synthetic peptide
  XENP020650 vlCDR1
KASQSVDYDGYSYMN

SEQ ID NO: 24829 - protein, 7 aa, Artificial Sequence
  Description of Artificial Sequence: Synthetic peptide
  XENP020650 vlCDR2
AASNLES

SEQ ID NO: 24830 - protein, 9 aa, Artificial Sequence
  Description of Artificial Sequence: Synthetic peptide
  XENP020650 vlCDR3
QQSNEDPFT

SEQ ID NO: 24831 - protein, 450 aa, Artificial Sequence; identical to SEQ ID NO: 22261
  Description of Artificial Sequence: Synthetic polypeptide
  XENP020651 7G8_H0_L0.47_IgG1_PVA_/S267K Heavy Chain

SEQ ID NO: 24832 - protein, 121 aa, Artificial Sequence; identical to SEQ ID NO: 22262
  Description of Artificial Sequence: Synthetic polypeptide
  VH of XENP020651

SEQ ID NO: 24833 - protein, 5 aa, Artificial Sequence
  Description of Artificial Sequence: Synthetic peptide
  XENP020651 vhCDR1
DAWMD

SEQ ID NO: 24834 - protein, 19 aa, Artificial Sequence
  Description of Artificial Sequence: Synthetic peptide
  XENP020651 vhCDR2
EIRTKANNHATYYAESVKG

SEQ ID NO: 24835 - protein, 10 aa, Artificial Sequence
  Description of Artificial Sequence: Synthetic peptide
  XENP020651 vhCDR3
LANWDWYFDV

SEQ ID NO: 24836 - protein, 218 aa, Artificial Sequence
  Description of Artificial Sequence: Synthetic polypeptide
  XENP020651 7G8_H0_L0.47_IgG1_PVA_/S267K Light Chain
DTVLTQSPASLAVSLGQRATISCKASQSVDYDGDSYMNWYQQKPGQPPKLLIKAASNLESGIPARLSGSGSGTDFTLNIHPVEEEDAATYYCQQSNEDPFTFGSGTKLEVKRTVAAPSVFIFPPSDEQLKSGTASVVCLLNNFYPREAKVQWKVDNALQSGNSQESVTEQDSKDSTYSLSSTLTLSKADYEKHKVYACEVTHQGLSSPVTKSFNRGEC

SEQ ID NO: 24837 - protein, 111 aa, Artificial Sequence
  Description of Artificial Sequence: Synthetic polypeptide
  VL of XENP020651
DTVLTQSPASLAVSLGQRATISCKASQSVDYDGDSYMNWYQQKPGQPPKLLIKAASNLESGIPARLSGSGSGTDFTLNIHPVEEEDAATYYCQQSNEDPFTFGSGTKLEVK

SEQ ID NO: 24838 - protein, 15 aa, Artificial Sequence
  Description of Artificial Sequence: Synthetic peptide
  XENP020651 vlCDR1
KASQSVDYDGDSYMN

SEQ ID NO: 24839 - protein, 7 aa, Artificial Sequence
  Description of Artificial Sequence: Synthetic peptide
  XENP020651 vlCDR2
AASNLES

SEQ ID NO: 24840 - protein, 9 aa, Artificial Sequence
  Description of Artificial Sequence: Synthetic peptide
  XENP020651 vlCDR3
QQSNEDPFT

SEQ ID NO: 24841 - protein, 450 aa, Artificial Sequence; identical to SEQ ID NO: 22261
  Description of Artificial Sequence: Synthetic polypeptide
  XENP020652 7G8_H0_L0.48_IgG1_PVA_/S267K Heavy Chain

SEQ ID NO: 24842 - protein, 121 aa, Artificial Sequence; identical to SEQ ID NO: 22262
  Description of Artificial Sequence: Synthetic polypeptide
  VH of XENP020652

SEQ ID NO: 24843 - protein, 5 aa, Artificial Sequence
  Description of Artificial Sequence: Synthetic peptide
  XENP020652 vhCDR1
DAWMD

SEQ ID NO: 24844 - protein, 19 aa, Artificial Sequence
  Description of Artificial Sequence: Synthetic peptide
  XENP020652 vhCDR2
EIRTKANNHATYYAESVKG

SEQ ID NO: 24845 - protein, 10 aa, Artificial Sequence
  Description of Artificial Sequence: Synthetic peptide
  XENP020652 vhCDR3
LANWDWYFDV

SEQ ID NO: 24846 - protein, 218 aa, Artificial Sequence
  Description of Artificial Sequence: Synthetic polypeptide
  XENP020652 7G8_H0_L0.48_IgG1_PVA_/S267K Light Chain
DTVLTQSPASLAVSLGQRATISCKASQSVDYDGDSYMNWYQQKPGQPPKLLIYSASNLESGIPARLSGSGSGTDFTLNIHPVEEEDAATYYCQQSNEDPFTFGSGTKLEVKRTVAAPSVFIFPPSDEQLKSGTASVVCLLNNFYPREAKVQWKVDNALQSGNSQESVTEQDSKDSTYSLSSTLTLSKADYEKHKVYACEVTHQGLSSPVTKSFNRGEC

SEQ ID NO: 24847 - protein, 111 aa, Artificial Sequence
  Description of Artificial Sequence: Synthetic polypeptide
  VL of XENP020652
DTVLTQSPASLAVSLGQRATISCKASQSVDYDGDSYMNWYQQKPGQPPKLLIYSASNLESGIPARLSGSGSGTDFTLNIHPVEEEDAATYYCQQSNEDPFTFGSGTKLEVK

SEQ ID NO: 24848 - protein, 15 aa, Artificial Sequence
  Description of Artificial Sequence: Synthetic peptide
  XENP020652 vlCDR1
KASQSVDYDGDSYMN

SEQ ID NO: 24849 - protein, 7 aa, Artificial Sequence
  Description of Artificial Sequence: Synthetic peptide
  XENP020652 vlCDR2
SASNLES

SEQ ID NO: 24850 - protein, 9 aa, Artificial Sequence
  Description of Artificial Sequence: Synthetic peptide
  XENP020652 vlCDR3
QQSNEDPFT

SEQ ID NO: 24851 - protein, 450 aa, Artificial Sequence; identical to SEQ ID NO: 22261
  Description of Artificial Sequence: Synthetic polypeptide
  XENP020653 7G8_H0_L0.49_IgG1_PVA_/S267K Heavy Chain

SEQ ID NO: 24852 - protein, 121 aa, Artificial Sequence; identical to SEQ ID NO: 22262
  Description of Artificial Sequence: Synthetic polypeptide
  VH of XENP020653

SEQ ID NO: 24853 - protein, 5 aa, Artificial Sequence
  Description of Artificial Sequence: Synthetic peptide
  XENP020653 vhCDR1
DAWMD

SEQ ID NO: 24854 - protein, 19 aa, Artificial Sequence
  Description of Artificial Sequence: Synthetic peptide
  XENP020653 vhCDR2
EIRTKANNHATYYAESVKG

SEQ ID NO: 24855 - protein, 10 aa, Artificial Sequence
  Description of Artificial Sequence: Synthetic peptide
  XENP020653 vhCDR3
LANWDWYFDV

SEQ ID NO: 24856 - protein, 218 aa, Artificial Sequence
  Description of Artificial Sequence: Synthetic polypeptide
  XENP020653 7G8_H0_L0.49_IgG1_PVA_/S267K Light Chain
DTVLTQSPASLAVSLGQRATISCKASQSVDYDGDSYMNWYQQKPGQPPKLLIYTASNLESGIPARLSGSGSGTDFTLNIHPVEEEDAATYYCQQSNEDPFTFGSGTKLEVKRTVAAPSVFIFPPSDEQLKSGTASVVCLLNNFYPREAKVQWKVDNALQSGNSQESVTEQDSKDSTYSLSSTLTLSKADYEKHKVYACEVTHQGLSSPVTKSFNRGEC

SEQ ID NO: 24857 - protein, 111 aa, Artificial Sequence
  Description of Artificial Sequence: Synthetic polypeptide
  VL of XENP020653
DTVLTQSPASLAVSLGQRATISCKASQSVDYDGDSYMNWYQQKPGQPPKLLIYTASNLESGIPARLSGSGSGTDFTLNIHPVEEEDAATYYCQQSNEDPFTFGSGTKLEVK

SEQ ID NO: 24858 - protein, 15 aa, Artificial Sequence
  Description of Artificial Sequence: Synthetic peptide
  XENP020653 vlCDR1
KASQSVDYDGDSYMN

SEQ ID NO: 24859 - protein, 7 aa, Artificial Sequence
  Description of Artificial Sequence: Synthetic peptide
  XENP020653 vlCDR2
TASNLES

SEQ ID NO: 24860 - protein, 9 aa, Artificial Sequence
  Description of Artificial Sequence: Synthetic peptide
  XENP020653 vlCDR3
QQSNEDPFT

SEQ ID NO: 24861 - protein, 450 aa, Artificial Sequence; identical to SEQ ID NO: 22261
  Description of Artificial Sequence: Synthetic polypeptide
  XENP020654 7G8_H0_L0.50_IgG1_PVA_/S267K Heavy Chain

SEQ ID NO: 24862 - protein, 121 aa, Artificial Sequence; identical to SEQ ID NO: 22262
  Description of Artificial Sequence: Synthetic polypeptide
  VH of XENP020654

SEQ ID NO: 24863 - protein, 5 aa, Artificial Sequence
  Description of Artificial Sequence: Synthetic peptide
  XENP020654 vhCDR1
DAWMD

SEQ ID NO: 24864 - protein, 19 aa, Artificial Sequence
  Description of Artificial Sequence: Synthetic peptide
  XENP020654 vhCDR2
EIRTKANNHATYYAESVKG

SEQ ID NO: 24865 - protein, 10 aa, Artificial Sequence
  Description of Artificial Sequence: Synthetic peptide
  XENP020654 vhCDR3
LANWDWYFDV

SEQ ID NO: 24866 - protein, 218 aa, Artificial Sequence
  Description of Artificial Sequence: Synthetic polypeptide
  XENP020654 7G8_H0_L0.50_IgG1_PVA_/S267K Light Chain
DTVLTQSPASLAVSLGQRATISCKASQSVDYDGDSYMNWYQQKPGQPPKLLIYGASNLESGIPARLSGSGSGTDFTLNIHPVEEEDAATYYCQQSNEDPFTFGSGTKLEVKRTVAAPSVFIFPPSDEQLKSGTASVVCLLNNFYPREAKVQWKVDNALQSGNSQESVTEQDSKDSTYSLSSTLTLSKADYEKHKVYACEVTHQGLSSPVTKSFNRGEC

SEQ ID NO: 24867 - protein, 111 aa, Artificial Sequence
  Description of Artificial Sequence: Synthetic polypeptide
  VL of XENP020654
DTVLTQSPASLAVSLGQRATISCKASQSVDYDGDSYMNWYQQKPGQPPKLLIYGASNLESGIPARLSGSGSGTDFTLNIHPVEEEDAATYYCQQSNEDPFTFGSGTKLEVK

SEQ ID NO: 24868 - protein, 15 aa, Artificial Sequence
  Description of Artificial Sequence: Synthetic peptide
  XENP020654 vlCDR1
KASQSVDYDGDSYMN

SEQ ID NO: 24869 - protein, 7 aa, Artificial Sequence
  Description of Artificial Sequence: Synthetic peptide
  XENP020654 vlCDR2
GASNLES

SEQ ID NO: 24870 - protein, 9 aa, Artificial Sequence
  Description of Artificial Sequence: Synthetic peptide
  XENP020654 vlCDR3
QQSNEDPFT

SEQ ID NO: 24871 - protein, 450 aa, Artificial Sequence; identical to SEQ ID NO: 22261
  Description of Artificial Sequence: Synthetic polypeptide
  XENP020655 7G8_H0_L0.51_IgG1_PVA_/S267K Heavy Chain

SEQ ID NO: 24872 - protein, 121 aa, Artificial Sequence; identical to SEQ ID NO: 22262
  Description of Artificial Sequence: Synthetic polypeptide
  VH of XENP020655

SEQ ID NO: 24873 - protein, 5 aa, Artificial Sequence
  Description of Artificial Sequence: Synthetic peptide
  XENP020655 vhCDR1
DAWMD

SEQ ID NO: 24874 - protein, 19 aa, Artificial Sequence
  Description of Artificial Sequence: Synthetic peptide
  XENP020655 vhCDR2
EIRTKANNHATYYAESVKG

SEQ ID NO: 24875 - protein, 10 aa, Artificial Sequence
  Description of Artificial Sequence: Synthetic peptide
  XENP020655 vhCDR3
LANWDWYFDV

SEQ ID NO: 24876 - protein, 218 aa, Artificial Sequence
  Description of Artificial Sequence: Synthetic polypeptide
  XENP020655 7G8_H0_L0.51_IgG1_PVA_/S267K Light Chain
DTVLTQSPASLAVSLGQRATISCKASQSVDYDGDSYMNWYQQKPGQPPKLLIYHASNLESGIPARLSGSGSGTDFTLNIHPVEEEDAATYYCQQSNEDPFTFGSGTKLEVKRTVAAPSVFIFPPSDEQLKSGTASVVCLLNNFYPREAKVQWKVDNALQSGNSQESVTEQDSKDSTYSLSSTLTLSKADYEKHKVYACEVTHQGLSSPVTKSFNRGEC

SEQ ID NO: 24877 - protein, 111 aa, Artificial Sequence
  Description of Artificial Sequence: Synthetic polypeptide
  VL of XENP020655
DTVLTQSPASLAVSLGQRATISCKASQSVDYDGDSYMNWYQQKPGQPPKLLIYHASNLESGIPARLSGSGSGTDFTLNIHPVEEEDAATYYCQQSNEDPFTFGSGTKLEVK

SEQ ID NO: 24878 - protein, 15 aa, Artificial Sequence
  Description of Artificial Sequence: Synthetic peptide
  XENP020655 vlCDR1
KASQSVDYDGDSYMN

SEQ ID NO: 24879 - protein, 7 aa, Artificial Sequence
  Description of Artificial Sequence: Synthetic peptide
  XENP020655 vlCDR2
HASNLES

SEQ ID NO: 24880 - protein, 9 aa, Artificial Sequence
  Description of Artificial Sequence: Synthetic peptide
  XENP020655 vlCDR3
QQSNEDPFT

SEQ ID NO: 24881 - protein, 450 aa, Artificial Sequence; identical to SEQ ID NO: 22261
  Description of Artificial Sequence: Synthetic polypeptide
  XENP020656 7G8_H0_L0.52_IgG1_PVA_/S267K Heavy Chain

SEQ ID NO: 24882 - protein, 121 aa, Artificial Sequence; identical to SEQ ID NO: 22262
  Description of Artificial Sequence: Synthetic polypeptide
  VH of XENP020656

SEQ ID NO: 24883 - protein, 5 aa, Artificial Sequence
  Description of Artificial Sequence: Synthetic peptide
  XENP020656 vhCDR1
DAWMD

SEQ ID NO: 24884 - protein, 19 aa, Artificial Sequence
  Description of Artificial Sequence: Synthetic peptide
  XENP020656 vhCDR2
EIRTKANNHATYYAESVKG

SEQ ID NO: 24885 - protein, 10 aa, Artificial Sequence
  Description of Artificial Sequence: Synthetic peptide
  XENP020656 vhCDR3
LANWDWYFDV

SEQ ID NO: 24886 - protein, 218 aa, Artificial Sequence
  Description of Artificial Sequence: Synthetic polypeptide
  XENP020656 7G8_H0_L0.52_IgG1_PVA_/S267K Light Chain
DTVLTQSPASLAVSLGQRATISCKASQSVDYDGDSYMNWYQQKPGQPPKLLIYQASNLESGIPARLSGSGSGTDFTLNIHPVEEEDAATYYCQQSNEDPFTFGSGTKLEVKRTVAAPSVFIFPPSDEQLKSGTASVVCLLNNFYPREAKVQWKVDNALQSGNSQESVTEQDSKDSTYSLSSTLTLSKADYEKHKVYACEVTHQGLSSPVTKSFNRGEC

SEQ ID NO: 24887 - protein, 111 aa, Artificial Sequence
  Description of Artificial Sequence: Synthetic polypeptide
  VL of XENP020656
DTVLTQSPASLAVSLGQRATISCKASQSVDYDGDSYMNWYQQKPGQPPKLLIYQASNLESGIPARLSGSGSGTDFTLNIHPVEEEDAATYYCQQSNEDPFTFGSGTKLEVK

SEQ ID NO: 24888 - protein, 15 aa, Artificial Sequence
  Description of Artificial Sequence: Synthetic peptide
  XENP020656 vlCDR1
KASQSVDYDGDSYMN

SEQ ID NO: 24889 - protein, 7 aa, Artificial Sequence
  Description of Artificial Sequence: Synthetic peptide
  XENP020656 vlCDR2
QASNLES

SEQ ID NO: 24890 - protein, 9 aa, Artificial Sequence
  Description of Artificial Sequence: Synthetic peptide
  XENP020656 vlCDR3
QQSNEDPFT

SEQ ID NO: 24891 - protein, 450 aa, Artificial Sequence; identical to SEQ ID NO: 22261
  Description of Artificial Sequence: Synthetic polypeptide
  XENP020657 7G8_H0_L0.53_IgG1_PVA_/S267K Heavy Chain

SEQ ID NO: 24892 - protein, 121 aa, Artificial Sequence; identical to SEQ ID NO: 22262
  Description of Artificial Sequence: Synthetic polypeptide
  VH of XENP020657

SEQ ID NO: 24893 - protein, 5 aa, Artificial Sequence
  Description of Artificial Sequence: Synthetic peptide
  XENP020657 vhCDR1
DAWMD

SEQ ID NO: 24894 - protein, 19 aa, Artificial Sequence
  Description of Artificial Sequence: Synthetic peptide
  XENP020657 vhCDR2
EIRTKANNHATYYAESVKG

SEQ ID NO: 24895 - protein, 10 aa, Artificial Sequence
  Description of Artificial Sequence: Synthetic peptide
  XENP020657 vhCDR3
LANWDWYFDV

SEQ ID NO: 24896 - protein, 218 aa, Artificial Sequence
  Description of Artificial Sequence: Synthetic polypeptide
  XENP020657 7G8_H0_L0.53_IgG1_PVA_/S267K Light Chain
DTVLTQSPASLAVSLGQRATISCKASQSVDYDGDSYMNWYQQKPGQPPKLLIYDASNLESGIPARLSGSGSGTDFTLNIHPVEEEDAATYYCQQSNEDPFTFGSGTKLEVKRTVAAPSVFIFPPSDEQLKSGTASVVCLLNNFYPREAKVQWKVDNALQSGNSQESVTEQDSKDSTYSLSSTLTLSKADYEKHKVYACEVTHQGLSSPVTKSFNRGEC

SEQ ID NO: 24897 - protein, 111 aa, Artificial Sequence
  Description of Artificial Sequence: Synthetic polypeptide
  VL of XENP020657
DTVLTQSPASLAVSLGQRATISCKASQSVDYDGDSYMNWYQQKPGQPPKLLIYDASNLESGIPARLSGSGSGTDFTLNIHPVEEEDAATYYCQQSNEDPFTFGSGTKLEVK

SEQ ID NO: 24898 - protein, 15 aa, Artificial Sequence
  Description of Artificial Sequence: Synthetic peptide
  XENP020657 vlCDR1
KASQSVDYDGDSYMN

SEQ ID NO: 24899 - protein, 7 aa, Artificial Sequence
  Description of Artificial Sequence: Synthetic peptide
  XENP020657 vlCDR2
DASNLES

SEQ ID NO: 24900 - protein, 9 aa, Artificial Sequence
  Description of Artificial Sequence: Synthetic peptide
  XENP020657 vlCDR3
QQSNEDPFT

SEQ ID NO: 24901 - protein, 450 aa, Artificial Sequence; identical to SEQ ID NO: 22261
  Description of Artificial Sequence: Synthetic polypeptide
  XENP020658 7G8_H0_L0.54_IgG1_PVA_/S267K Heavy Chain

SEQ ID NO: 24902 - protein, 121 aa, Artificial Sequence; identical to SEQ ID NO: 22262
  Description of Artificial Sequence: Synthetic polypeptide
  VH of XENP020658

SEQ ID NO: 24903 - protein, 5 aa, Artificial Sequence
  Description of Artificial Sequence: Synthetic peptide
  XENP020658 vhCDR1
DAWMD

SEQ ID NO: 24904 - protein, 19 aa, Artificial Sequence
  Description of Artificial Sequence: Synthetic peptide
  XENP020658 vhCDR2
EIRTKANNHATYYAESVKG

SEQ ID NO: 24905 - protein, 10 aa, Artificial Sequence
  Description of Artificial Sequence: Synthetic peptide
  XENP020658 vhCDR3
LANWDWYFDV

SEQ ID NO: 24906 - protein, 218 aa, Artificial Sequence
  Description of Artificial Sequence: Synthetic polypeptide
  XENP020658 7G8_H0_L0.54_IgG1_PVA_/S267K Light Chain
DTVLTQSPASLAVSLGQRATISCKASQSVDYDGDSYMNWYQQKPGQPPKLLIYLASNLESGIPARLSGSGSGTDFTLNIHPVEEEDAATYYCQQSNEDPFTFGSGTKLEVKRTVAAPSVFIFPPSDEQLKSGTASVVCLLNNFYPREAKVQWKVDNALQSGNSQESVTEQDSKDSTYSLSSTLTLSKADYEKHKVYACEVTHQGLSSPVTKSFNRGEC

SEQ ID NO: 24907 - protein, 111 aa, Artificial Sequence
  Description of Artificial Sequence: Synthetic polypeptide
  VL of XENP020658
DTVLTQSPASLAVSLGQRATISCKASQSVDYDGDSYMNWYQQKPGQPPKLLIYLASNLESGIPARLSGSGSGTDFTLNIHPVEEEDAATYYCQQSNEDPFTFGSGTKLEVK

SEQ ID NO: 24908 - protein, 15 aa, Artificial Sequence
  Description of Artificial Sequence: Synthetic peptide
  XENP020658 vlCDR1
KASQSVDYDGDSYMN

SEQ ID NO: 24909 - protein, 7 aa, Artificial Sequence
  Description of Artificial Sequence: Synthetic peptide
  XENP020658 vlCDR2
LASNLES

SEQ ID NO: 24910 - protein, 9 aa, Artificial Sequence
  Description of Artificial Sequence: Synthetic peptide
  XENP020658 vlCDR3
QQSNEDPFT

SEQ ID NO: 24911 - protein, 450 aa, Artificial Sequence; identical to SEQ ID NO: 22261
  Description of Artificial Sequence: Synthetic polypeptide
  XENP020659 7G8_H0_L0.55_IgG1_PVA_/S267K Heavy Chain

SEQ ID NO: 24912 - protein, 121 aa, Artificial Sequence; identical to SEQ ID NO: 22262
  Description of Artificial Sequence: Synthetic polypeptide
  VH of XENP020659

SEQ ID NO: 24913 - protein, 5 aa, Artificial Sequence
  Description of Artificial Sequence: Synthetic peptide
  XENP020659 vhCDR1
DAWMD

SEQ ID NO: 24914 - protein, 19 aa, Artificial Sequence
  Description of Artificial Sequence: Synthetic peptide
  XENP020659 vhCDR2
EIRTKANNHATYYAESVKG

SEQ ID NO: 24915 - protein, 10 aa, Artificial Sequence
  Description of Artificial Sequence: Synthetic peptide
  XENP020659 vhCDR3
LANWDWYFDV

SEQ ID NO: 24916 - protein, 218 aa, Artificial Sequence
  Description of Artificial Sequence: Synthetic polypeptide
  XENP020659 7G8_H0_L0.55_IgG1_PVA_/S267K Light Chain
DTVLTQSPASLAVSLGQRATISCKASQSVDYDGDSYMNWYQQKPGQPPKLLIYKASNLESGIPARLSGSGSGTDFTLNIHPVEEEDAATYYCQQSNEDPFTFGSGTKLEVKRTVAAPSVFIFPPSDEQLKSGTASVVCLLNNFYPREAKVQWKVDNALQSGNSQESVTEQDSKDSTYSLSSTLTLSKADYEKHKVYACEVTHQGLSSPVTKSFNRGEC

SEQ ID NO: 24917 - protein, 111 aa, Artificial Sequence
  Description of Artificial Sequence: Synthetic polypeptide
  VL of XENP020659
DTVLTQSPASLAVSLGQRATISCKASQSVDYDGDSYMNWYQQKPGQPPKLLIYKASNLESGIPARLSGSGSGTDFTLNIHPVEEEDAATYYCQQSNEDPFTFGSGTKLEVK

SEQ ID NO: 24918 - protein, 15 aa, Artificial Sequence
  Description of Artificial Sequence: Synthetic peptide
  XENP020659 vlCDR1
KASQSVDYDGDSYMN

SEQ ID NO: 24919 - protein, 7 aa, Artificial Sequence
  Description of Artificial Sequence: Synthetic peptide
  XENP020659 vlCDR2
KASNLES

SEQ ID NO: 24920 - protein, 9 aa, Artificial Sequence
  Description of Artificial Sequence: Synthetic peptide
  XENP020659 vlCDR3
QQSNEDPFT

SEQ ID NO: 24921 - protein, 450 aa, Artificial Sequence; identical to SEQ ID NO: 22261
  Description of Artificial Sequence: Synthetic polypeptide
  XENP020660 7G8_H0_L0.56_IgG1_PVA_/S267K Heavy Chain

SEQ ID NO: 24922 - protein, 121 aa, Artificial Sequence; identical to SEQ ID NO: 22262
  Description of Artificial Sequence: Synthetic polypeptide
  VH of XENP020660

SEQ ID NO: 24923 - protein, 5 aa, Artificial Sequence
  Description of Artificial Sequence: Synthetic peptide
  XENP020660 vhCDR1
DAWMD

SEQ ID NO: 24924 - protein, 19 aa, Artificial Sequence
  Description of Artificial Sequence: Synthetic peptide
  XENP020660 vhCDR2
EIRTKANNHATYYAESVKG

SEQ ID NO: 24925 - protein, 10 aa, Artificial Sequence
  Description of Artificial Sequence: Synthetic peptide
  XENP020660 vhCDR3
LANWDWYFDV

SEQ ID NO: 24926 - protein, 218 aa, Artificial Sequence
  Description of Artificial Sequence: Synthetic polypeptide
  XENP020660 7G8_H0_L0.56_IgG1_PVA_/S267K Light Chain
DTVLTQSPASLAVSLGQRATISCKASQSVDYDGDSYMNWYQQKPGQPPKLLIYYASNLESGIPARLSGSGSGTDFTLNIHPVEEEDAATYYCQQSNEDPFTFGSGTKLEVKRTVAAPSVFIFPPSDEQLKSGTASVVCLLNNFYPREAKVQWKVDNALQSGNSQESVTEQDSKDSTYSLSSTLTLSKADYEKHKVYACEVTHQGLSSPVTKSFNRGEC

SEQ ID NO: 24927 - protein, 111 aa, Artificial Sequence
  Description of Artificial Sequence: Synthetic polypeptide
  VL of XENP020660
DTVLTQSPASLAVSLGQRATISCKASQSVDYDGDSYMNWYQQKPGQPPKLLIYYASNLESGIPARLSGSGSGTDFTLNIHPVEEEDAATYYCQQSNEDPFTFGSGTKLEVK

SEQ ID NO: 24928 - protein, 15 aa, Artificial Sequence
  Description of Artificial Sequence: Synthetic peptide
  XENP020660 vlCDR1
KASQSVDYDGDSYMN

SEQ ID NO: 24929 - protein, 7 aa, Artificial Sequence
  Description of Artificial Sequence: Synthetic peptide
  XENP020660 vlCDR2
YASNLES

SEQ ID NO: 24930 - protein, 9 aa, Artificial Sequence
  Description of Artificial Sequence: Synthetic peptide
  XENP020660 vlCDR3
QQSNEDPFT

SEQ ID NO: 24931 - protein, 450 aa, Artificial Sequence; identical to SEQ ID NO: 22261
  Description of Artificial Sequence: Synthetic polypeptide
  XENP020661 7G8_H0_L0.57_IgG1_PVA_/S267K Heavy Chain

SEQ ID NO: 24932 - protein, 121 aa, Artificial Sequence; identical to SEQ ID NO: 22262
  Description of Artificial Sequence: Synthetic polypeptide
  VH of XENP020661

SEQ ID NO: 24933 - protein, 5 aa, Artificial Sequence
  Description of Artificial Sequence: Synthetic peptide
  XENP020661 vhCDR1
DAWMD

SEQ ID NO: 24934 - protein, 19 aa, Artificial Sequence
  Description of Artificial Sequence: Synthetic peptide
  XENP020661 vhCDR2
EIRTKANNHATYYAESVKG

SEQ ID NO: 24935 - protein, 10 aa, Artificial Sequence
  Description of Artificial Sequence: Synthetic peptide
  XENP020661 vhCDR3
LANWDWYFDV

SEQ ID NO: 24936 - protein, 218 aa, Artificial Sequence
  Description of Artificial Sequence: Synthetic polypeptide
  XENP020661 7G8_H0_L0.57_IgG1_PVA_/S267K Light Chain
DTVLTQSPASLAVSLGQRATISCKASQSVDYDGDSYMNWYQQKPGQPPKLLIYAASDLESGIPARLSGSGSGTDFTLNIHPVEEEDAATYYCQQSNEDPFTFGSGTKLEVKRTVAAPSVFIFPPSDEQLKSGTASVVCLLNNFYPREAKVQWKVDNALQSGNSQESVTEQDSKDSTYSLSSTLTLSKADYEKHKVYACEVTHQGLSSPVTKSFNRGEC

SEQ ID NO: 24937 - protein, 111 aa, Artificial Sequence
  Description of Artificial Sequence: Synthetic polypeptide
  VL of XENP020661
DTVLTQSPASLAVSLGQRATISCKASQSVDYDGDSYMNWYQQKPGQPPKLLIYAASDLESGIPARLSGSGSGTDFTLNIHPVEEEDAATYYCQQSNEDPFTFGSGTKLEVK

SEQ ID NO: 24938 - protein, 15 aa, Artificial Sequence
  Description of Artificial Sequence: Synthetic peptide
  XENP020661 vlCDR1
KASQSVDYDGDSYMN

SEQ ID NO: 24939 - protein, 7 aa, Artificial Sequence
  Description of Artificial Sequence: Synthetic peptide
  XENP020661 vlCDR2
AASDLES

SEQ ID NO: 24940 - protein, 9 aa, Artificial Sequence
  Description of Artificial Sequence: Synthetic peptide
  XENP020661 vlCDR3
QQSNEDPFT

SEQ ID NO: 24941 - protein, 450 aa, Artificial Sequence; identical to SEQ ID NO: 22261
  Description of Artificial Sequence: Synthetic polypeptide
  XENP020662 7G8_H0_L0.58_IgG1_PVA_/S267K Heavy Chain

SEQ ID NO: 24942 - protein, 121 aa, Artificial Sequence; identical to SEQ ID NO: 22262
  Description of Artificial Sequence: Synthetic polypeptide
  VH of XENP020662

SEQ ID NO: 24943 - protein, 5 aa, Artificial Sequence
  Description of Artificial Sequence: Synthetic peptide
  XENP020662 vhCDR1
DAWMD

SEQ ID NO: 24944 - protein, 19 aa, Artificial Sequence
  Description of Artificial Sequence: Synthetic peptide
  XENP020662 vhCDR2
EIRTKANNHATYYAESVKG

SEQ ID NO: 24945 - protein, 10 aa, Artificial Sequence
  Description of Artificial Sequence: Synthetic peptide
  XENP020662 vhCDR3
LANWDWYFDV

SEQ ID NO: 24946 - protein, 218 aa, Artificial Sequence
  Description of Artificial Sequence: Synthetic polypeptide
  XENP020662 7G8_H0_L0.58_IgG1_PVA_/S267K Light Chain
DTVLTQSPASLAVSLGQRATISCKASQSVDYDGDSYMNWYQQKPGQPPKLLIYAASHLESGIPARLSGSGSGTDFTLNIHPVEEEDAATYYCQQSNEDPFTFGSGTKLEVKRTVAAPSVFIFPPSDEQLKSGTASVVCLLNNFYPREAKVQWKVDNALQSGNSQESVTEQDSKDSTYSLSSTLTLSKADYEKHKVYACEVTHQGLSSPVTKSFNRGEC

SEQ ID NO: 24947 - protein, 111 aa, Artificial Sequence
  Description of Artificial Sequence: Synthetic polypeptide
  VL of XENP020662
DTVLTQSPASLAVSLGQRATISCKASQSVDYDGDSYMNWYQQKPGQPPKLLIYAASHLESGIPARLSGSGSGTDFTLNIHPVEEEDAATYYCQQSNEDPFTFGSGTKLEVK

SEQ ID NO: 24948 - protein, 15 aa, Artificial Sequence
  Description of Artificial Sequence: Synthetic peptide
  XENP020662 vlCDR1
KASQSVDYDGDSYMN

SEQ ID NO: 24949 - protein, 7 aa, Artificial Sequence
  Description of Artificial Sequence: Synthetic peptide
  XENP020662 vlCDR2
AASHLES

SEQ ID NO: 24950 - protein, 9 aa, Artificial Sequence
  Description of Artificial Sequence: Synthetic peptide
  XENP020662 vlCDR3
QQSNEDPFT

SEQ ID NO: 24951 - protein, 450 aa, Artificial Sequence; identical to SEQ ID NO: 22261
  Description of Artificial Sequence: Synthetic polypeptide
  XENP020663 7G8_H0_L0.59_IgG1_PVA_/S267K Heavy Chain

SEQ ID NO: 24952 - protein, 121 aa, Artificial Sequence; identical to SEQ ID NO: 22262
  Description of Artificial Sequence: Synthetic polypeptide
  VH of XENP020663

SEQ ID NO: 24953 - protein, 5 aa, Artificial Sequence
  Description of Artificial Sequence: Synthetic peptide
  XENP020663 vhCDR1
DAWMD

SEQ ID NO: 24954 - protein, 19 aa, Artificial Sequence
  Description of Artificial Sequence: Synthetic peptide
  XENP020663 vhCDR2
EIRTKANNHATYYAESVKG

SEQ ID NO: 24955 - protein, 10 aa, Artificial Sequence
  Description of Artificial Sequence: Synthetic peptide
  XENP020663 vhCDR3
LANWDWYFDV

SEQ ID NO: 24956 - protein, 218 aa, Artificial Sequence
  Description of Artificial Sequence: Synthetic polypeptide
  XENP020663 7G8_H0_L0.59_IgG1_PVA_/S267K Light Chain
DTVLTQSPASLAVSLGQRATISCKASQSVDYDGDSYMNWYQQKPGQPPKLLIYAASELESGIPARLSGSGSGTDFTLNIHPVEEEDAATYYCQQSNEDPFTFGSGTKLEVKRTVAAPSVFIFPPSDEQLKSGTASVVCLLNNFYPREAKVQWKVDNALQSGNSQESVTEQDSKDSTYSLSSTLTLSKADYEKHKVYACEVTHQGLSSPVTKSFNRGEC

SEQ ID NO: 24957 - protein, 111 aa, Artificial Sequence
  Description of Artificial Sequence: Synthetic polypeptide
  VL of XENP020663
DTVLTQSPASLAVSLGQRATISCKASQSVDYDGDSYMNWYQQKPGQPPKLLIYAASELESGIPARLSGSGSGTDFTLNIHPVEEEDAATYYCQQSNEDPFTFGSGTKLEVK

SEQ ID NO: 24958 - protein, 15 aa, Artificial Sequence
  Description of Artificial Sequence: Synthetic peptide
  XENP020663 vlCDR1
KASQSVDYDGDSYMN

SEQ ID NO: 24959 - protein, 7 aa, Artificial Sequence
  Description of Artificial Sequence: Synthetic peptide
  XENP020663 vlCDR2
AASELES

SEQ ID NO: 24960 - protein, 9 aa, Artificial Sequence
  Description of Artificial Sequence: Synthetic peptide
  XENP020663 vlCDR3
QQSNEDPFT

SEQ ID NO: 24961 - protein, 450 aa, Artificial Sequence; identical to SEQ ID NO: 22261
  Description of Artificial Sequence: Synthetic polypeptide
  XENP020664 7G8_H0_L0.60_IgG1_PVA_/S267K Heavy Chain

SEQ ID NO: 24962 - protein, 121 aa, Artificial Sequence; identical to SEQ ID NO: 22262
  Description of Artificial Sequence: Synthetic polypeptide
  VH of XENP020664

SEQ ID NO: 24963 - protein, 5 aa, Artificial Sequence
  Description of Artificial Sequence: Synthetic peptide
  XENP020664 vhCDR1
DAWMD

SEQ ID NO: 24964 - protein, 19 aa, Artificial Sequence
  Description of Artificial Sequence: Synthetic peptide
  XENP020664 vhCDR2
EIRTKANNHATYYAESVKG

SEQ ID NO: 24965 - protein, 10 aa, Artificial Sequence
  Description of Artificial Sequence: Synthetic peptide
  XENP020664 vhCDR3
LANWDWYFDV

SEQ ID NO: 24966 - protein, 218 aa, Artificial Sequence
  Description of Artificial Sequence: Synthetic polypeptide
  XENP020664 7G8_H0_L0.60_IgG1_PVA_/S267K Light Chain
DTVLTQSPASLAVSLGQRATISCKASQSVDYDGDSYMNWYQQKPGQPPKLLIYAASSLESGIPARLSGSGSGTDFTLNIHPVEEEDAATYYCQQSNEDPFTFGSGTKLEVKRTVAAPSVFIFPPSDEQLKSGTASVVCLLNNFYPREAKVQWKVDNALQSGNSQESVTEQDSKDSTYSLSSTLTLSKADYEKHKVYACEVTHQGLSSPVTKSFNRGEC

SEQ ID NO: 24967 - protein, 111 aa, Artificial Sequence
  Description of Artificial Sequence: Synthetic polypeptide
  VL of XENP020664
DTVLTQSPASLAVSLGQRATISCKASQSVDYDGDSYMNWYQQKPGQPPKLLIYAASSLESGIPARLSGSGSGTDFTLNIHPVEEEDAATYYCQQSNEDPFTFGSGTKLEVK

SEQ ID NO: 24968 - protein, 15 aa, Artificial Sequence
  Description of Artificial Sequence: Synthetic peptide
  XENP020664 vlCDR1
KASQSVDYDGDSYMN

SEQ ID NO: 24969 - protein, 7 aa, Artificial Sequence
  Description of Artificial Sequence: Synthetic peptide
  XENP020664 vlCDR2
AASSLES

SEQ ID NO: 24970 - protein, 9 aa, Artificial Sequence
  Description of Artificial Sequence: Synthetic peptide
  XENP020664 vlCDR3
QQSNEDPFT

SEQ ID NO: 24971 - protein, 450 aa, Artificial Sequence; identical to SEQ ID NO: 22261
  Description of Artificial Sequence: Synthetic polypeptide
  XENP020665 7G8_H0_L0.61_IgG1_PVA_/S267K Heavy Chain

SEQ ID NO: 24972 - protein, 121 aa, Artificial Sequence; identical to SEQ ID NO: 22262
  Description of Artificial Sequence: Synthetic polypeptide
  VH of XENP020665

SEQ ID NO: 24973 - protein, 5 aa, Artificial Sequence
  Description of Artificial Sequence: Synthetic peptide
  XENP020665 vhCDR1
DAWMD

SEQ ID NO: 24974 - protein, 19 aa, Artificial Sequence
  Description of Artificial Sequence: Synthetic peptide
  XENP020665 vhCDR2
EIRTKANNHATYYAESVKG

SEQ ID NO: 24975 - protein, 10 aa, Artificial Sequence
  Description of Artificial Sequence: Synthetic peptide
  XENP020665 vhCDR3
LANWDWYFDV

SEQ ID NO: 24976 - protein, 218 aa, Artificial Sequence
  Description of Artificial Sequence: Synthetic polypeptide
  XENP020665 7G8_H0_L0.61_IgG1_PVA_/S267K Light Chain
DTVLTQSPASLAVSLGQRATISCKASQSVDYDGDSYMNWYQQKPGQPPKLLIYAASRLESGIPARLSGSGSGTDFTLNIHPVEEEDAATYYCQQSNEDPFTFGSGTKLEVKRTVAAPSVFIFPPSDEQLKSGTASVVCLLNNFYPREAKVQWKVDNALQSGNSQESVTEQDSKDSTYSLSSTLTLSKADYEKHKVYACEVTHQGLSSPVTKSFNRGEC

SEQ ID NO: 24977 - protein, 111 aa, Artificial Sequence
  Description of Artificial Sequence: Synthetic polypeptide
  VL of XENP020665
DTVLTQSPASLAVSLGQRATISCKASQSVDYDGDSYMNWYQQKPGQPPKLLIYAASRLESGIPARLSGSGSGTDFTLNIHPVEEEDAATYYCQQSNEDPFTFGSGTKLEVK

SEQ ID NO: 24978 - protein, 15 aa, Artificial Sequence
  Description of Artificial Sequence: Synthetic peptide
  XENP020665 vlCDR1
KASQSVDYDGDSYMN

SEQ ID NO: 24979 - protein, 7 aa, Artificial Sequence
  Description of Artificial Sequence: Synthetic peptide
  XENP020665 vlCDR2
AASRLES

SEQ ID NO: 24980 - protein, 9 aa, Artificial Sequence
  Description of Artificial Sequence: Synthetic peptide
  XENP020665 vlCDR3
QQSNEDPFT

SEQ ID NO: 24981 - protein, 450 aa, Artificial Sequence; identical to SEQ ID NO: 22261
  Description of Artificial Sequence: Synthetic polypeptide
  XENP020666 7G8_H0_L0.62_IgG1_PVA_/S267K Heavy Chain

SEQ ID NO: 24982 - protein, 121 aa, Artificial Sequence; identical to SEQ ID NO: 22262
  Description of Artificial Sequence: Synthetic polypeptide
  VH of XENP020666

SEQ ID NO: 24983 - protein, 5 aa, Artificial Sequence
  Description of Artificial Sequence: Synthetic peptide
  XENP020666 vhCDR1
DAWMD

SEQ ID NO: 24984 - protein, 19 aa, Artificial Sequence
  Description of Artificial Sequence: Synthetic peptide
  XENP020666 vhCDR2
EIRTKANNHATYYAESVKG

SEQ ID NO: 24985 - protein, 10 aa, Artificial Sequence
  Description of Artificial Sequence: Synthetic peptide
  XENP020666 vhCDR3
LANWDWYFDV

SEQ ID NO: 24986 - protein, 218 aa, Artificial Sequence
  Description of Artificial Sequence: Synthetic polypeptide
  XENP020666 7G8_H0_L0.62_IgG1_PVA_/S267K Light Chain
DTVLTQSPASLAVSLGQRATISCKASQSVDYDGDSYMNWYQQKPGQPPKLLIYAASLLESGIPARLSGSGSGTDFTLNIHPVEEEDAATYYCQQSNEDPFTFGSGTKLEVKRTVAAPSVFIFPPSDEQLKSGTASVVCLLNNFYPREAKVQWKVDNALQSGNSQESVTEQDSKDSTYSLSSTLTLSKADYEKHKVYACEVTHQGLSSPVTKSFNRGEC

SEQ ID NO: 24987 - protein, 111 aa, Artificial Sequence
  Description of Artificial Sequence: Synthetic polypeptide
  VL of XENP020666
DTVLTQSPASLAVSLGQRATISCKASQSVDYDGDSYMNWYQQKPGQPPKLLIYAASLLESGIPARLSGSGSGTDFTLNIHPVEEEDAATYYCQQSNEDPFTFGSGTKLEVK

SEQ ID NO: 24988 - protein, 15 aa, Artificial Sequence
  Description of Artificial Sequence: Synthetic peptide
  XENP020666 vlCDR1
KASQSVDYDGDSYMN

SEQ ID NO: 24989 - protein, 7 aa, Artificial Sequence
  Description of Artificial Sequence: Synthetic peptide
  XENP020666 vlCDR2
AASLLES

SEQ ID NO: 24990 - protein, 9 aa, Artificial Sequence
  Description of Artificial Sequence: Synthetic peptide
  XENP020666 vlCDR3
QQSNEDPFT

SEQ ID NO: 24991 - protein, 450 aa, Artificial Sequence; identical to SEQ ID NO: 22261
  Description of Artificial Sequence: Synthetic polypeptide
  XENP020667 7G8_H0_L0.63_IgG1_PVA_/S267K Heavy Chain

SEQ ID NO: 24992 - protein, 121 aa, Artificial Sequence; identical to SEQ ID NO: 22262
  Description of Artificial Sequence: Synthetic polypeptide
  VH of XENP020667

SEQ ID NO: 24993 - protein, 5 aa, Artificial Sequence
  Description of Artificial Sequence: Synthetic peptide
  XENP020667 vhCDR1
DAWMD

SEQ ID NO: 24994 - protein, 19 aa, Artificial Sequence
  Description of Artificial Sequence: Synthetic peptide
  XENP020667 vhCDR2
EIRTKANNHATYYAESVKG

SEQ ID NO: 24995 - protein, 10 aa, Artificial Sequence
  Description of Artificial Sequence: Synthetic peptide
  XENP020667 vhCDR3
LANWDWYFDV

SEQ ID NO: 24996 - protein, 218 aa, Artificial Sequence
  Description of Artificial Sequence: Synthetic polypeptide
  XENP020667 7G8_H0_L0.63_IgG1_PVA_/S267K Light Chain
DTVLTQSPASLAVSLGQRATISCKASQSVDYDGDSYMNWYQQKPGQPPKLLIYAASTLESGIPARLSGSGSGTDFTLNIHPVEEEDAATYYCQQSNEDPFTFGSGTKLEVKRTVAAPSVFIFPPSDEQLKSGTASVVCLLNNFYPREAKVQWKVDNALQSGNSQESVTEQDSKDSTYSLSSTLTLSKADYEKHKVYACEVTHQGLSSPVTKSFNRGEC

SEQ ID NO: 24997 - protein, 111 aa, Artificial Sequence
  Description of Artificial Sequence: Synthetic polypeptide
  VL of XENP020667
DTVLTQSPASLAVSLGQRATISCKASQSVDYDGDSYMNWYQQKPGQPPKLLIYAASTLESGIPARLSGSGSGTDFTLNIHPVEEEDAATYYCQQSNEDPFTFGSGTKLEVK

SEQ ID NO: 24998 - protein, 15 aa, Artificial Sequence
  Description of Artificial Sequence: Synthetic peptide
  XENP020667 vlCDR1
KASQSVDYDGDSYMN

SEQ ID NO: 24999 - protein, 7 aa, Artificial Sequence
  Description of Artificial Sequence: Synthetic peptide
  XENP020667 vlCDR2
AASTLES

SEQ ID NO: 25000 - protein, 9 aa, Artificial Sequence
  Description of Artificial Sequence: Synthetic peptide
  XENP020667 vlCDR3
QQSNEDPFT

SEQ ID NO: 25001 - protein, 450 aa, Artificial Sequence; identical to SEQ ID NO: 22261
  Description of Artificial Sequence: Synthetic polypeptide
  XENP020668 7G8_H0_L0.64_IgG1_PVA_/S267K Heavy Chain

SEQ ID NO: 25002 - protein, 121 aa, Artificial Sequence; identical to SEQ ID NO: 22262
  Description of Artificial Sequence: Synthetic polypeptide
  VH of XENP020668

SEQ ID NO: 25003 - protein, 5 aa, Artificial Sequence
  Description of Artificial Sequence: Synthetic peptide
  XENP020668 vhCDR1
DAWMD

SEQ ID NO: 25004 - protein, 19 aa, Artificial Sequence
  Description of Artificial Sequence: Synthetic peptide
  XENP020668 vhCDR2
EIRTKANNHATYYAESVKG

SEQ ID NO: 25005 - protein, 10 aa, Artificial Sequence
  Description of Artificial Sequence: Synthetic peptide
  XENP020668 vhCDR3
LANWDWYFDV

SEQ ID NO: 25006 - protein, 218 aa, Artificial Sequence
  Description of Artificial Sequence: Synthetic polypeptide
  XENP020668 7G8_H0_L0.64_IgG1_PVA_/S267K Light Chain
DTVLTQSPASLAVSLGQRATISCKASQSVDYDGDSYMNWYQQKPGQPPKLLIYAASGLESGIPARLSGSGSGTDFTLNIHPVEEEDAATYYCQQSNEDPFTFGSGTKLEVKRTVAAPSVFIFPPSDEQLKSGTASVVCLLNNFYPREAKVQWKVDNALQSGNSQESVTEQDSKDSTYSLSSTLTLSKADYEKHKVYACEVTHQGLSSPVTKSFNRGEC

SEQ ID NO: 25007 - protein, 111 aa, Artificial Sequence
  Description of Artificial Sequence: Synthetic polypeptide
  VL of XENP020668
DTVLTQSPASLAVSLGQRATISCKASQSVDYDGDSYMNWYQQKPGQPPKLLIYAASGLESGIPARLSGSGSGTDFTLNIHPVEEEDAATYYCQQSNEDPFTFGSGTKLEVK

SEQ ID NO: 25008 - protein, 15 aa, Artificial Sequence
  Description of Artificial Sequence: Synthetic peptide
  XENP020668 vlCDR1
KASQSVDYDGDSYMN

SEQ ID NO: 25009 - protein, 7 aa, Artificial Sequence
  Description of Artificial Sequence: Synthetic peptide
  XENP020668 vlCDR2
AASGLES

SEQ ID NO: 25010 - protein, 9 aa, Artificial Sequence
  Description of Artificial Sequence: Synthetic peptide
  XENP020668 vlCDR3
QQSNEDPFT

SEQ ID NO: 25011 - protein, 450 aa, Artificial Sequence; identical to SEQ ID NO: 22261
  Description of Artificial Sequence: Synthetic polypeptide
  XENP020669 7G8_H0_L0.65_IgG1_PVA_/S267K Heavy Chain

SEQ ID NO: 25012 - protein, 121 aa, Artificial Sequence; identical to SEQ ID NO: 22262
  Description of Artificial Sequence: Synthetic polypeptide
  VH of XENP020669

SEQ ID NO: 25013 - protein, 5 aa, Artificial Sequence
  Description of Artificial Sequence: Synthetic peptide
  XENP020669 vhCDR1
DAWMD

SEQ ID NO: 25014 - protein, 19 aa, Artificial Sequence
  Description of Artificial Sequence: Synthetic peptide
  XENP020669 vhCDR2
EIRTKANNHATYYAESVKG

SEQ ID NO: 25015 - protein, 10 aa, Artificial Sequence
  Description of Artificial Sequence: Synthetic peptide
  XENP020669 vhCDR3
LANWDWYFDV

SEQ ID NO: 25016 - protein, 218 aa, Artificial Sequence
  Description of Artificial Sequence: Synthetic polypeptide
  XENP020669 7G8_H0_L0.65_IgG1_PVA_/S267K Light Chain
DTVLTQSPASLAVSLGQRATISCKASQSVDYDGDSYMNWYQQKPGQPPKLLIYAASYLESGIPARLSGSGSGTDFTLNIHPVEEEDAATYYCQQSNEDPFTFGSGTKLEVKRTVAAPSVFIFPPSDEQLKSGTASVVCLLNNFYPREAKVQWKVDNALQSGNSQESVTEQDSKDSTYSLSSTLTLSKADYEKHKVYACEVTHQGLSSPVTKSFNRGEC

SEQ ID NO: 25017 - protein, 111 aa, Artificial Sequence
  Description of Artificial Sequence: Synthetic polypeptide
  VL of XENP020669
DTVLTQSPASLAVSLGQRATISCKASQSVDYDGDSYMNWYQQKPGQPPKLLIYAASYLESGIPARLSGSGSGTDFTLNIHPVEEEDAATYYCQQSNEDPFTFGSGTKLEVK

SEQ ID NO: 25018 - protein, 15 aa, Artificial Sequence
  Description of Artificial Sequence: Synthetic peptide
  XENP020669 vlCDR1
KASQSVDYDGDSYMN

SEQ ID NO: 25019 - protein, 7 aa, Artificial Sequence
  Description of Artificial Sequence: Synthetic peptide
  XENP020669 vlCDR2
AASYLES

SEQ ID NO: 25020 - protein, 9 aa, Artificial Sequence
  Description of Artificial Sequence: Synthetic peptide
  XENP020669 vlCDR3
QQSNEDPFT

SEQ ID NO: 25021 - protein, 450 aa, Artificial Sequence; identical to SEQ ID NO: 22261
  Description of Artificial Sequence: Synthetic polypeptide
  XENP020670 7G8_H0_L0.66_IgG1_PVA_/S267K Heavy Chain

SEQ ID NO: 25022 - protein, 121 aa, Artificial Sequence; identical to SEQ ID NO: 22262
  Description of Artificial Sequence: Synthetic polypeptide
  VH of XENP020670

SEQ ID NO: 25023 - protein, 5 aa, Artificial Sequence
  Description of Artificial Sequence: Synthetic peptide
  XENP020670 vhCDR1
DAWMD

SEQ ID NO: 25024 - protein, 19 aa, Artificial Sequence
  Description of Artificial Sequence: Synthetic peptide
  XENP020670 vhCDR2
EIRTKANNHATYYAESVKG

SEQ ID NO: 25025 - protein, 10 aa, Artificial Sequence
  Description of Artificial Sequence: Synthetic peptide
  XENP020670 vhCDR3
LANWDWYFDV

SEQ ID NO: 25026 - protein, 218 aa, Artificial Sequence
  Description of Artificial Sequence: Synthetic polypeptide
  XENP020670 7G8_H0_L0.66_IgG1_PVA_/S267K Light Chain
DTVLTQSPASLAVSLGQRATISCKASQSVDYDGDSYMNWYQQKPGQPPKLLIYAASNLQSGIPARLSGSGSGTDFTLNIHPVEEEDAATYYCQQSNEDPFTFGSGTKLEVKRTVAAPSVFIFPPSDEQLKSGTASVVCLLNNFYPREAKVQWKVDNALQSGNSQESVTEQDSKDSTYSLSSTLTLSKADYEKHKVYACEVTHQGLSSPVTKSFNRGEC

SEQ ID NO: 25027 - protein, 111 aa, Artificial Sequence
  Description of Artificial Sequence: Synthetic polypeptide
  VL of XENP020670
DTVLTQSPASLAVSLGQRATISCKASQSVDYDGDSYMNWYQQKPGQPPKLLIYAASNLQSGIPARLSGSGSGTDFTLNIHPVEEEDAATYYCQQSNEDPFTFGSGTKLEVK

SEQ ID NO: 25028 - protein, 15 aa, Artificial Sequence
  Description of Artificial Sequence: Synthetic peptide
  XENP020670 vlCDR1
KASQSVDYDGDSYMN

SEQ ID NO: 25029 - protein, 7 aa, Artificial Sequence
  Description of Artificial Sequence: Synthetic peptide
  XENP020670 vlCDR2
AASNLQS

SEQ ID NO: 25030 - protein, 9 aa, Artificial Sequence
  Description of Artificial Sequence: Synthetic peptide
  XENP020670 vlCDR3
QQSNEDPFT

SEQ ID NO: 25031 - protein, 450 aa, Artificial Sequence; identical to SEQ ID NO: 22261
  Description of Artificial Sequence: Synthetic polypeptide
  XENP020671 7G8_H0_L0.67_IgG1_PVA_/S267K Heavy Chain

SEQ ID NO: 25032 - protein, 121 aa, Artificial Sequence; identical to SEQ ID NO: 22262
  Description of Artificial Sequence: Synthetic polypeptide
  VH of XENP020671

SEQ ID NO: 25033 - protein, 5 aa, Artificial Sequence
  Description of Artificial Sequence: Synthetic peptide
  XENP020671 vhCDR1
DAWMD

SEQ ID NO: 25034 - protein, 19 aa, Artificial Sequence
  Description of Artificial Sequence: Synthetic peptide
  XENP020671 vhCDR2
EIRTKANNHATYYAESVKG

SEQ ID NO: 25035 - protein, 10 aa, Artificial Sequence
  Description of Artificial Sequence: Synthetic peptide
  XENP020671 vhCDR3
LANWDWYFDV

SEQ ID NO: 25036 - protein, 218 aa, Artificial Sequence
  Description of Artificial Sequence: Synthetic polypeptide
  XENP020671 7G8_H0_L0.67_IgG1_PVA_/S267K Light Chain
DTVLTQSPASLAVSLGQRATISCKASQSVDYDGDSYMNWYQQKPGQPPKLLIYAASNLDSGIPARLSGSGSGTDFTLNIHPVEEEDAATYYCQQSNEDPFTFGSGTKLEVKRTVAAPSVFIFPPSDEQLKSGTASVVCLLNNFYPREAKVQWKVDNALQSGNSQESVTEQDSKDSTYSLSSTLTLSKADYEKHKVYACEVTHQGLSSPVTKSFNRGEC

SEQ ID NO: 25037 - protein, 111 aa, Artificial Sequence
  Description of Artificial Sequence: Synthetic polypeptide
  VL of XENP020671
DTVLTQSPASLAVSLGQRATISCKASQSVDYDGDSYMNWYQQKPGQPPKLLIYAASNLDSGIPARLSGSGSGTDFTLNIHPVEEEDAATYYCQQSNEDPFTFGSGTKLEVK

SEQ ID NO: 25038 - protein, 15 aa, Artificial Sequence
  Description of Artificial Sequence: Synthetic peptide
  XENP020671 vlCDR1
KASQSVDYDGDSYMN

SEQ ID NO: 25039 - protein, 7 aa, Artificial Sequence
  Description of Artificial Sequence: Synthetic peptide
  XENP020671 vlCDR2
AASNLDS

SEQ ID NO: 25040 - protein, 9 aa, Artificial Sequence
  Description of Artificial Sequence: Synthetic peptide
  XENP020671 vlCDR3
QQSNEDPFT

SEQ ID NO: 25041 - protein, 450 aa, Artificial Sequence; identical to SEQ ID NO: 22261
  Description of Artificial Sequence: Synthetic polypeptide
  XENP020672 7G8_H0_L0.68_IgG1_PVA_/S267K Heavy Chain

SEQ ID NO: 25042 - protein, 121 aa, Artificial Sequence; identical to SEQ ID NO: 22262
  Description of Artificial Sequence: Synthetic polypeptide
  VH of XENP020672

SEQ ID NO: 25043 - protein, 5 aa, Artificial Sequence
  Description of Artificial Sequence: Synthetic peptide
  XENP020672 vhCDR1
DAWMD

SEQ ID NO: 25044 - protein, 19 aa, Artificial Sequence
  Description of Artificial Sequence: Synthetic peptide
  XENP020672 vhCDR2
EIRTKANNHATYYAESVKG

SEQ ID NO: 25045 - protein, 10 aa, Artificial Sequence
  Description of Artificial Sequence: Synthetic peptide
  XENP020672 vhCDR3
LANWDWYFDV

SEQ ID NO: 25046 - protein, 218 aa, Artificial Sequence
  Description of Artificial Sequence: Synthetic polypeptide
  XENP020672 7G8_H0_L0.68_IgG1_PVA_/S267K Light Chain
DTVLTQSPASLAVSLGQRATISCKASQSVDYDGDSYMNWYQQKPGQPPKLLIYAASNLKSGIPARLSGSGSGTDFTLNIHPVEEEDAATYYCQQSNEDPFTFGSGTKLEVKRTVAAPSVFIFPPSDEQLKSGTASVVCLLNNFYPREAKVQWKVDNALQSGNSQESVTEQDSKDSTYSLSSTLTLSKADYEKHKVYACEVTHQGLSSPVTKSFNRGEC

SEQ ID NO: 25047 - protein, 111 aa, Artificial Sequence
  Description of Artificial Sequence: Synthetic polypeptide
  VL of XENP020672
DTVLTQSPASLAVSLGQRATISCKASQSVDYDGDSYMNWYQQKPGQPPKLLIYAASNLKSGIPARLSGSGSGTDFTLNIHPVEEEDAATYYCQQSNEDPFTFGSGTKLEVK

SEQ ID NO: 25048 - protein, 15 aa, Artificial Sequence
  Description of Artificial Sequence: Synthetic peptide
  XENP020672 vlCDR1
KASQSVDYDGDSYMN

SEQ ID NO: 25049 - protein, 7 aa, Artificial Sequence
  Description of Artificial Sequence: Synthetic peptide
  XENP020672 vlCDR2
AASNLKS

SEQ ID NO: 25050 - protein, 9 aa, Artificial Sequence
  Description of Artificial Sequence: Synthetic peptide
  XENP020672 vlCDR3
QQSNEDPFT

SEQ ID NO: 25051 - protein, 450 aa, Artificial Sequence; identical to SEQ ID NO: 22261
  Description of Artificial Sequence: Synthetic polypeptide
  XENP020673 7G8_H0_L0.69_IgG1_PVA_/S267K Heavy Chain

SEQ ID NO: 25052 - protein, 121 aa, Artificial Sequence; identical to SEQ ID NO: 22262
  Description of Artificial Sequence: Synthetic polypeptide
  VH of XENP020673

SEQ ID NO: 25053 - protein, 5 aa, Artificial Sequence
  Description of Artificial Sequence: Synthetic peptide
  XENP020673 vhCDR1
DAWMD

SEQ ID NO: 25054 - protein, 19 aa, Artificial Sequence
  Description of Artificial Sequence: Synthetic peptide
  XENP020673 vhCDR2
EIRTKANNHATYYAESVKG

SEQ ID NO: 25055 - protein, 10 aa, Artificial Sequence
  Description of Artificial Sequence: Synthetic peptide
  XENP020673 vhCDR3
LANWDWYFDV

SEQ ID NO: 25056 - protein, 218 aa, Artificial Sequence
  Description of Artificial Sequence: Synthetic polypeptide
  XENP020673 7G8_H0_L0.69_IgG1_PVA_/S267K Light Chain
DTVLTQSPASLAVSLGQRATISCKASQSVDYDGDSYMNWYQQKPGQPPKLLIYAASNLHSGIPARLSGSGSGTDFTLNIHPVEEEDAATYYCQQSNEDPFTFGSGTKLEVKRTVAAPSVFIFPPSDEQLKSGTASVVCLLNNFYPREAKVQWKVDNALQSGNSQESVTEQDSKDSTYSLSSTLTLSKADYEKHKVYACEVTHQGLSSPVTKSFNRGEC

SEQ ID NO: 25057 - protein, 111 aa, Artificial Sequence
  Description of Artificial Sequence: Synthetic polypeptide
  VL of XENP020673
DTVLTQSPASLAVSLGQRATISCKASQSVDYDGDSYMNWYQQKPGQPPKLLIYAASNLHSGIPARLSGSGSGTDFTLNIHPVEEEDAATYYCQQSNEDPFTFGSGTKLEVK

SEQ ID NO: 25058 - protein, 15 aa, Artificial Sequence
  Description of Artificial Sequence: Synthetic peptide
  XENP020673 vlCDR1
KASQSVDYDGDSYMN

SEQ ID NO: 25059 - protein, 7 aa, Artificial Sequence
  Description of Artificial Sequence: Synthetic peptide
  XENP020673 vlCDR2
AASNLHS

SEQ ID NO: 25060 - protein, 9 aa, Artificial Sequence
  Description of Artificial Sequence: Synthetic peptide
  XENP020673 vlCDR3
QQSNEDPFT

SEQ ID NO: 25061 - protein, 450 aa, Artificial Sequence; identical to SEQ ID NO: 22261
  Description of Artificial Sequence: Synthetic polypeptide
  XENP020674 7G8_H0_L0.70_IgG1_PVA_/S267K Heavy Chain

SEQ ID NO: 25062 - protein, 121 aa, Artificial Sequence; identical to SEQ ID NO: 22262
  Description of Artificial Sequence: Synthetic polypeptide
  VH of XENP020674

SEQ ID NO: 25063 - protein, 5 aa, Artificial Sequence
  Description of Artificial Sequence: Synthetic peptide
  XENP020674 vhCDR1
DAWMD

SEQ ID NO: 25064 - protein, 19 aa, Artificial Sequence
  Description of Artificial Sequence: Synthetic peptide
  XENP020674 vhCDR2
EIRTKANNHATYYAESVKG

SEQ ID NO: 25065 - protein, 10 aa, Artificial Sequence
  Description of Artificial Sequence: Synthetic peptide
  XENP020674 vhCDR3
LANWDWYFDV

SEQ ID NO: 25066 - protein, 218 aa, Artificial Sequence
  Description of Artificial Sequence: Synthetic polypeptide
  XENP020674 7G8_H0_L0.70_IgG1_PVA_/S267K Light Chain
DTVLTQSPASLAVSLGQRATISCKASQSVDYDGDSYMNWYQQKPGQPPKLLIYAASNLASGIPARLSGSGSGTDFTLNIHPVEEEDAATYYCQQSNEDPFTFGSGTKLEVKRTVAAPSVFIFPPSDEQLKSGTASVVCLLNNFYPREAKVQWKVDNALQSGNSQESVTEQDSKDSTYSLSSTLTLSKADYEKHKVYACEVTHQGLSSPVTKSFNRGEC

SEQ ID NO: 25067 - protein, 111 aa, Artificial Sequence
  Description of Artificial Sequence: Synthetic polypeptide
  VL of XENP020674
DTVLTQSPASLAVSLGQRATISCKASQSVDYDGDSYMNWYQQKPGQPPKLLIYAASNLASGIPARLSGSGSGTDFTLNIHPVEEEDAATYYCQQSNEDPFTFGSGTKLEVK

SEQ ID NO: 25068 - protein, 15 aa, Artificial Sequence
  Description of Artificial Sequence: Synthetic peptide
  XENP020674 vlCDR1
KASQSVDYDGDSYMN

SEQ ID NO: 25069 - protein, 7 aa, Artificial Sequence
  Description of Artificial Sequence: Synthetic peptide
  XENP020674 vlCDR2
AASNLAS

SEQ ID NO: 25070 - protein, 9 aa, Artificial Sequence
  Description of Artificial Sequence: Synthetic peptide
  XENP020674 vlCDR3
QQSNEDPFT

SEQ ID NO: 25071 - protein, 450 aa, Artificial Sequence; identical to SEQ ID NO: 22261
  Description of Artificial Sequence: Synthetic polypeptide
  XENP020675 7G8_H0_L0.71_IgG1_PVA_/S267K Heavy Chain

SEQ ID NO: 25072 - protein, 121 aa, Artificial Sequence; identical to SEQ ID NO: 22262
  Description of Artificial Sequence: Synthetic polypeptide
  VH of XENP020675

SEQ ID NO: 25073 - protein, 5 aa, Artificial Sequence
  Description of Artificial Sequence: Synthetic peptide
  XENP020675 vhCDR1
DAWMD

SEQ ID NO: 25074 - protein, 19 aa, Artificial Sequence
  Description of Artificial Sequence: Synthetic peptide
  XENP020675 vhCDR2
EIRTKANNHATYYAESVKG

SEQ ID NO: 25075 - protein, 10 aa, Artificial Sequence
  Description of Artificial Sequence: Synthetic peptide
  XENP020675 vhCDR3
LANWDWYFDV

SEQ ID NO: 25076 - protein, 218 aa, Artificial Sequence
  Description of Artificial Sequence: Synthetic polypeptide
  XENP020675 7G8_H0_L0.71_IgG1_PVA_/S267K Light Chain
DTVLTQSPASLAVSLGQRATISCKASQSVDYDGDSYMNWYQQKPGQPPKLLIYAASNLGSGIPARLSGSGSGTDFTLNIHPVEEEDAATYYCQQSNEDPFTFGSGTKLEVKRTVAAPSVFIFPPSDEQLKSGTASVVCLLNNFYPREAKVQWKVDNALQSGNSQESVTEQDSKDSTYSLSSTLTLSKADYEKHKVYACEVTHQGLSSPVTKSFNRGEC

SEQ ID NO: 25077 - protein, 111 aa, Artificial Sequence
  Description of Artificial Sequence: Synthetic polypeptide
  VL of XENP020675
DTVLTQSPASLAVSLGQRATISCKASQSVDYDGDSYMNWYQQKPGQPPKLLIYAASNLGSGIPARLSGSGSGTDFTLNIHPVEEEDAATYYCQQSNEDPFTFGSGTKLEVK

SEQ ID NO: 25078 - protein, 15 aa, Artificial Sequence
  Description of Artificial Sequence: Synthetic peptide
  XENP020675 vlCDR1
KASQSVDYDGDSYMN

SEQ ID NO: 25079 - protein, 7 aa, Artificial Sequence
  Description of Artificial Sequence: Synthetic peptide
  XENP020675 vlCDR2
AASNLGS

SEQ ID NO: 25080 - protein, 9 aa, Artificial Sequence
  Description of Artificial Sequence: Synthetic peptide
  XENP020675 vlCDR3
QQSNEDPFT

SEQ ID NO: 25081 - protein, 450 aa, Artificial Sequence; identical to SEQ ID NO: 22261
  Description of Artificial Sequence: Synthetic polypeptide
  XENP020676 7G8_H0_L0.72_IgG1_PVA_/S267K Heavy Chain

SEQ ID NO: 25082 - protein, 121 aa, Artificial Sequence; identical to SEQ ID NO: 22262
  Description of Artificial Sequence: Synthetic polypeptide
  VH of XENP020676

SEQ ID NO: 25083 - protein, 5 aa, Artificial Sequence
  Description of Artificial Sequence: Synthetic peptide
  XENP020676 vhCDR1
DAWMD

SEQ ID NO: 25084 - protein, 19 aa, Artificial Sequence
  Description of Artificial Sequence: Synthetic peptide
  XENP020676 vhCDR2
EIRTKANNHATYYAESVKG

SEQ ID NO: 25085 - protein, 10 aa, Artificial Sequence
  Description of Artificial Sequence: Synthetic peptide
  XENP020676 vhCDR3
LANWDWYFDV

SEQ ID NO: 25086 - protein, 218 aa, Artificial Sequence
  Description of Artificial Sequence: Synthetic polypeptide
  XENP020676 7G8_H0_L0.72_IgG1_PVA_/S267K Light Chain
DTVLTQSPASLAVSLGQRATISCKASQSVDYDGDSYMNWYQQKPGQPPKLLIYAASNLYSGIPARLSGSGSGTDFTLNIHPVEEEDAATYYCQQSNEDPFTFGSGTKLEVKRTVAAPSVFIFPPSDEQLKSGTASVVCLLNNFYPREAKVQWKVDNALQSGNSQESVTEQDSKDSTYSLSSTLTLSKADYEKHKVYACEVTHQGLSSPVTKSFNRGEC

SEQ ID NO: 25087 - protein, 111 aa, Artificial Sequence
  Description of Artificial Sequence: Synthetic polypeptide
  VL of XENP020676
DTVLTQSPASLAVSLGQRATISCKASQSVDYDGDSYMNWYQQKPGQPPKLLIYAASNLYSGIPARLSGSGSGTDFTLNIHPVEEEDAATYYCQQSNEDPFTFGSGTKLEVK

SEQ ID NO: 25088 - protein, 15 aa, Artificial Sequence
  Description of Artificial Sequence: Synthetic peptide
  XENP020676 vlCDR1
KASQSVDYDGDSYMN

SEQ ID NO: 25089 - protein, 7 aa, Artificial Sequence
  Description of Artificial Sequence: Synthetic peptide
  XENP020676 vlCDR2
AASNLYS

SEQ ID NO: 25090 - protein, 9 aa, Artificial Sequence
  Description of Artificial Sequence: Synthetic peptide
  XENP020676 vlCDR3
QQSNEDPFT

SEQ ID NO: 25091 - protein, 450 aa, Artificial Sequence; identical to SEQ ID NO: 22261
  Description of Artificial Sequence: Synthetic polypeptide
  XENP020677 7G8_H0_L0.73_IgG1_PVA_/S267K Heavy Chain

SEQ ID NO: 25092 - protein, 121 aa, Artificial Sequence; identical to SEQ ID NO: 22262
  Description of Artificial Sequence: Synthetic polypeptide
  VH of XENP020677

SEQ ID NO: 25093 - protein, 5 aa, Artificial Sequence
  Description of Artificial Sequence: Synthetic peptide
  XENP020677 vhCDR1
DAWMD

SEQ ID NO: 25094 - protein, 19 aa, Artificial Sequence
  Description of Artificial Sequence: Synthetic peptide
  XENP020677 vhCDR2
EIRTKANNHATYYAESVKG

SEQ ID NO: 25095 - protein, 10 aa, Artificial Sequence
  Description of Artificial Sequence: Synthetic peptide
  XENP020677 vhCDR3
LANWDWYFDV

SEQ ID NO: 25096 - protein, 218 aa, Artificial Sequence
  Description of Artificial Sequence: Synthetic polypeptide
  XENP020677 7G8_H0_L0.73_IgG1_PVA_/S267K Light Chain
DTVLTQSPASLAVSLGQRATISCKASQSVDYDGDSYMNWYQQKPGQPPKLLIYAASNLISGIPARLSGSGSGTDFTLNIHPVEEEDAATYYCQQSNEDPFTFGSGTKLEVKRTVAAPSVFIFPPSDEQLKSGTASVVCLLNNFYPREAKVQWKVDNALQSGNSQESVTEQDSKDSTYSLSSTLTLSKADYEKHKVYACEVTHQGLSSPVTKSFNRGEC

SEQ ID NO: 25097 - protein, 111 aa, Artificial Sequence
  Description of Artificial Sequence: Synthetic polypeptide
  VL of XENP020677
DTVLTQSPASLAVSLGQRATISCKASQSVDYDGDSYMNWYQQKPGQPPKLLIYAASNLISGIPARLSGSGSGTDFTLNIHPVEEEDAATYYCQQSNEDPFTFGSGTKLEVK

SEQ ID NO: 25098 - protein, 15 aa, Artificial Sequence
  Description of Artificial Sequence: Synthetic peptide
  XENP020677 vlCDR1
KASQSVDYDGDSYMN

SEQ ID NO: 25099 - protein, 7 aa, Artificial Sequence
  Description of Artificial Sequence: Synthetic peptide
  XENP020677 vlCDR2
AASNLIS

SEQ ID NO: 25100 - protein, 9 aa, Artificial Sequence
  Description of Artificial Sequence: Synthetic peptide
  XENP020677 vlCDR3
QQSNEDPFT

SEQ ID NO: 25101 - protein, 450 aa, Artificial Sequence; identical to SEQ ID NO: 22261
  Description of Artificial Sequence: Synthetic polypeptide
  XENP020678 7G8_H0_L0.74_IgG1_PVA_/S267K Heavy Chain

SEQ ID NO: 25102 - protein, 121 aa, Artificial Sequence; identical to SEQ ID NO: 22262
  Description of Artificial Sequence: Synthetic polypeptide
  VH of XENP020678

SEQ ID NO: 25103 - protein, 5 aa, Artificial Sequence
  Description of Artificial Sequence: Synthetic peptide
  XENP020678 vhCDR1
DAWMD

SEQ ID NO: 25104 - protein, 19 aa, Artificial Sequence
  Description of Artificial Sequence: Synthetic peptide
  XENP020678 vhCDR2
EIRTKANNHATYYAESVKG

SEQ ID NO: 25105 - protein, 10 aa, Artificial Sequence
  Description of Artificial Sequence: Synthetic peptide
  XENP020678 vhCDR3
LANWDWYFDV

SEQ ID NO: 25106 - protein, 218 aa, Artificial Sequence
  Description of Artificial Sequence: Synthetic polypeptide
  XENP020678 7G8_H0_L0.74_IgG1_PVA_/S267K Light Chain
DTVLTQSPASLAVSLGQRATISCKASQSVDYDGDSYMNWYQQKPGQPPKLLIYAASNLESGIPARLSGSGSGTDFTLNIHPVEEEDAATYYCQQTNEDPFTFGSGTKLEVKRTVAAPSVFIFPPSDEQLKSGTASVVCLLNNFYPREAKVQWKVDNALQSGNSQESVTEQDSKDSTYSLSSTLTLSKADYEKHKVYACEVTHQGLSSPVTKSFNRGEC

SEQ ID NO: 25107 - protein, 111 aa, Artificial Sequence
  Description of Artificial Sequence: Synthetic polypeptide
  VL of XENP020678
DTVLTQSPASLAVSLGQRATISCKASQSVDYDGDSYMNWYQQKPGQPPKLLIYAASNLESGIPARLSGSGSGTDFTLNIHPVEEEDAATYYCQQTNEDPFTFGSGTKLEVK

SEQ ID NO: 25108 - protein, 15 aa, Artificial Sequence
  Description of Artificial Sequence: Synthetic peptide
  XENP020678 vlCDR1
KASQSVDYDGDSYMN

SEQ ID NO: 25109 - protein, 7 aa, Artificial Sequence
  Description of Artificial Sequence: Synthetic peptide
  XENP020678 vlCDR2
AASNLES

SEQ ID NO: 25110 - protein, 9 aa, Artificial Sequence
  Description of Artificial Sequence: Synthetic peptide
  XENP020678 vlCDR3
QQTNEDPFT

SEQ ID NO: 25111 - protein, 450 aa, Artificial Sequence; identical to SEQ ID NO: 22261
  Description of Artificial Sequence: Synthetic polypeptide
  XENP020679 7G8_H0_L0.75_IgG1_PVA_/S267K Heavy Chain

SEQ ID NO: 25112 - protein, 121 aa, Artificial Sequence; identical to SEQ ID NO: 22262
  Description of Artificial Sequence: Synthetic polypeptide
  VH of XENP020679

SEQ ID NO: 25113 - protein, 5 aa, Artificial Sequence
  Description of Artificial Sequence: Synthetic peptide
  XENP020679 vhCDR1
DAWMD

SEQ ID NO: 25114 - protein, 19 aa, Artificial Sequence
  Description of Artificial Sequence: Synthetic peptide
  XENP020679 vhCDR2
EIRTKANNHATYYAESVKG

SEQ ID NO: 25115 - protein, 10 aa, Artificial Sequence
  Description of Artificial Sequence: Synthetic peptide
  XENP020679 vhCDR3
LANWDWYFDV

SEQ ID NO: 25116 - protein, 218 aa, Artificial Sequence
  Description of Artificial Sequence: Synthetic polypeptide
  XENP020679 7G8_H0_L0.75_IgG1_PVA_/S267K Light Chain
DTVLTQSPASLAVSLGQRATISCKASQSVDYDGDSYMNWYQQKPGQPPKLLIYAASNLESGIPARLSGSGSGTDFTLNIHPVEEEDAATYYCQQANEDPFTFGSGTKLEVKRTVAAPSVFIFPPSDEQLKSGTASVVCLLNNFYPREAKVQWKVDNALQSGNSQESVTEQDSKDSTYSLSSTLTLSKADYEKHKVYACEVTHQGLSSPVTKSFNRGEC

SEQ ID NO: 25117 - protein, 111 aa, Artificial Sequence
  Description of Artificial Sequence: Synthetic polypeptide
  VL of XENP020679
DTVLTQSPASLAVSLGQRATISCKASQSVDYDGDSYMNWYQQKPGQPPKLLIYAASNLESGIPARLSGSGSGTDFTLNIHPVEEEDAATYYCQQANEDPFTFGSGTKLEVK

SEQ ID NO: 25118 - protein, 15 aa, Artificial Sequence
  Description of Artificial Sequence: Synthetic peptide
  XENP020679 vlCDR1
KASQSVDYDGDSYMN

SEQ ID NO: 25119 - protein, 7 aa, Artificial Sequence
  Description of Artificial Sequence: Synthetic peptide
  XENP020679 vlCDR2
AASNLES

SEQ ID NO: 25120 - protein, 9 aa, Artificial Sequence
  Description of Artificial Sequence: Synthetic peptide
  XENP020679 vlCDR3
QQANEDPFT

SEQ ID NO: 25121 - protein, 450 aa, Artificial Sequence; identical to SEQ ID NO: 22261
  Description of Artificial Sequence: Synthetic polypeptide
  XENP020680 7G8_H0_L0.76_IgG1_PVA_/S267K Heavy Chain

SEQ ID NO: 25122 - protein, 121 aa, Artificial Sequence; identical to SEQ ID NO: 22262
  Description of Artificial Sequence: Synthetic polypeptide
  VH of XENP020680

SEQ ID NO: 25123 - protein, 5 aa, Artificial Sequence
  Description of Artificial Sequence: Synthetic peptide
  XENP020680 vhCDR1
DAWMD

SEQ ID NO: 25124 - protein, 19 aa, Artificial Sequence
  Description of Artificial Sequence: Synthetic peptide
  XENP020680 vhCDR2
EIRTKANNHATYYAESVKG

SEQ ID NO: 25125 - protein, 10 aa, Artificial Sequence
  Description of Artificial Sequence: Synthetic peptide
  XENP020680 vhCDR3
LANWDWYFDV

SEQ ID NO: 25126 - protein, 218 aa, Artificial Sequence
  Description of Artificial Sequence: Synthetic polypeptide
  XENP020680 7G8_H0_L0.76_IgG1_PVA_/S267K Light Chain
DTVLTQSPASLAVSLGQRATISCKASQSVDYDGDSYMNWYQQKPGQPPKLLIYAASNLESGIPARLSGSGSGTDFTLNIHPVEEEDAATYYCQQQNEDPFTFGSGTKLEVKRTVAAPSVFIFPPSDEQLKSGTASVVCLLNNFYPREAKVQWKVDNALQSGNSQESVTEQDSKDSTYSLSSTLTLSKADYEKHKVYACEVTHQGLSSPVTKSFNRGEC

SEQ ID NO: 25127 - protein, 111 aa, Artificial Sequence
  Description of Artificial Sequence: Synthetic polypeptide
  VL of XENP020680
DTVLTQSPASLAVSLGQRATISCKASQSVDYDGDSYMNWYQQKPGQPPKLLIYAASNLESGIPARLSGSGSGTDFTLNIHPVEEEDAATYYCQQQNEDPFTFGSGTKLEVK

SEQ ID NO: 25128 - protein, 15 aa, Artificial Sequence
  Description of Artificial Sequence: Synthetic peptide
  XENP020680 vlCDR1
KASQSVDYDGDSYMN

SEQ ID NO: 25129 - protein, 7 aa, Artificial Sequence
  Description of Artificial Sequence: Synthetic peptide
  XENP020680 vlCDR2
AASNLES

SEQ ID NO: 25130 - protein, 9 aa, Artificial Sequence
  Description of Artificial Sequence: Synthetic peptide
  XENP020680 vlCDR3
QQQNEDPFT

SEQ ID NO: 25131 - protein, 450 aa, Artificial Sequence; identical to SEQ ID NO: 22261
  Description of Artificial Sequence: Synthetic polypeptide
  XENP020681 7G8_H0_L0.77_IgG1_PVA_/S267K Heavy Chain

SEQ ID NO: 25132 - protein, 121 aa, Artificial Sequence; identical to SEQ ID NO: 22262
  Description of Artificial Sequence: Synthetic polypeptide
  VH of XENP020681

SEQ ID NO: 25133 - protein, 5 aa, Artificial Sequence
  Description of Artificial Sequence: Synthetic peptide
  XENP020681 vhCDR1
DAWMD

SEQ ID NO: 25134 - protein, 19 aa, Artificial Sequence
  Description of Artificial Sequence: Synthetic peptide
  XENP020681 vhCDR2
EIRTKANNHATYYAESVKG

SEQ ID NO: 25135 - protein, 10 aa, Artificial Sequence
  Description of Artificial Sequence: Synthetic peptide
  XENP020681 vhCDR3
LANWDWYFDV

SEQ ID NO: 25136 - protein, 218 aa, Artificial Sequence
  Description of Artificial Sequence: Synthetic polypeptide
  XENP020681 7G8_H0_L0.77_IgG1_PVA_/S267K Light Chain
DTVLTQSPASLAVSLGQRATISCKASQSVDYDGDSYMNWYQQKPGQPPKLLIYAASNLESGIPARLSGSGSGTDFTLNIHPVEEEDAATYYCQQGNEDPFTFGSGTKLEVKRTVAAPSVFIFPPSDEQLKSGTASVVCLLNNFYPREAKVQWKVDNALQSGNSQESVTEQDSKDSTYSLSSTLTLSKADYEKHKVYACEVTHQGLSSPVTKSFNRGEC

SEQ ID NO: 25137 - protein, 111 aa, Artificial Sequence
  Description of Artificial Sequence: Synthetic polypeptide
  VL of XENP020681
DTVLTQSPASLAVSLGQRATISCKASQSVDYDGDSYMNWYQQKPGQPPKLLIYAASNLESGIPARLSGSGSGTDFTLNIHPVEEEDAATYYCQQGNEDPFTFGSGTKLEVK

SEQ ID NO: 25138 - protein, 15 aa, Artificial Sequence
  Description of Artificial Sequence: Synthetic peptide
  XENP020681 vlCDR1
KASQSVDYDGDSYMN

SEQ ID NO: 25139 - protein, 7 aa, Artificial Sequence
  Description of Artificial Sequence: Synthetic peptide
  XENP020681 vlCDR2
AASNLES

SEQ ID NO: 25140 - protein, 9 aa, Artificial Sequence
  Description of Artificial Sequence: Synthetic peptide
  XENP020681 vlCDR3
QQGNEDPFT

SEQ ID NO: 25141 - protein, 450 aa, Artificial Sequence; identical to SEQ ID NO: 22261
  Description of Artificial Sequence: Synthetic polypeptide
  XENP020682 7G8_H0_L0.78_IgG1_PVA_/S267K Heavy Chain

SEQ ID NO: 25142 - protein, 121 aa, Artificial Sequence; identical to SEQ ID NO: 22262
  Description of Artificial Sequence: Synthetic polypeptide
  VH of XENP020682

SEQ ID NO: 25143 - protein, 5 aa, Artificial Sequence
  Description of Artificial Sequence: Synthetic peptide
  XENP020682 vhCDR1
DAWMD

SEQ ID NO: 25144 - protein, 19 aa, Artificial Sequence
  Description of Artificial Sequence: Synthetic peptide
  XENP020682 vhCDR2
EIRTKANNHATYYAESVKG

SEQ ID NO: 25145 - protein, 10 aa, Artificial Sequence
  Description of Artificial Sequence: Synthetic peptide
  XENP020682 vhCDR3
LANWDWYFDV

SEQ ID NO: 25146 - protein, 218 aa, Artificial Sequence
  Description of Artificial Sequence: Synthetic polypeptide
  XENP020682 7G8_H0_L0.78_IgG1_PVA_/S267K Light Chain
DTVLTQSPASLAVSLGQRATISCKASQSVDYDGDSYMNWYQQKPGQPPKLLIYAASNLESGIPARLSGSGSGTDFTLNIHPVEEEDAATYYCQQVNEDPFTFGSGTKLEVKRTVAAPSVFIFPPSDEQLKSGTASVVCLLNNFYPREAKVQWKVDNALQSGNSQESVTEQDSKDSTYSLSSTLTLSKADYEKHKVYACEVTHQGLSSPVTKSFNRGEC

SEQ ID NO: 25147 - protein, 111 aa, Artificial Sequence
  Description of Artificial Sequence: Synthetic polypeptide
  VL of XENP020682
DTVLTQSPASLAVSLGQRATISCKASQSVDYDGDSYMNWYQQKPGQPPKLLIYAASNLESGIPARLSGSGSGTDFTLNIHPVEEEDAATYYCQQVNEDPFTFGSGTKLEVK

SEQ ID NO: 25148 - protein, 15 aa, Artificial Sequence
  Description of Artificial Sequence: Synthetic peptide
  XENP020682 vlCDR1
KASQSVDYDGDSYMN

SEQ ID NO: 25149 - protein, 7 aa, Artificial Sequence
  Description of Artificial Sequence: Synthetic peptide
  XENP020682 vlCDR2
AASNLES

SEQ ID NO: 25150 - protein, 9 aa, Artificial Sequence
  Description of Artificial Sequence: Synthetic peptide
  XENP020682 vlCDR3
QQVNEDPFT

SEQ ID NO: 25151 - protein, 450 aa, Artificial Sequence; identical to SEQ ID NO: 22261
  Description of Artificial Sequence: Synthetic polypeptide
  XENP020683 7G8_H0_L0.79_IgG1_PVA_/S267K Heavy Chain

SEQ ID NO: 25152 - protein, 121 aa, Artificial Sequence; identical to SEQ ID NO: 22262
  Description of Artificial Sequence: Synthetic polypeptide
  VH of XENP020683

SEQ ID NO: 25153 - protein, 5 aa, Artificial Sequence
  Description of Artificial Sequence: Synthetic peptide
  XENP020683 vhCDR1
DAWMD

SEQ ID NO: 25154 - protein, 19 aa, Artificial Sequence
  Description of Artificial Sequence: Synthetic peptide
  XENP020683 vhCDR2
EIRTKANNHATYYAESVKG

SEQ ID NO: 25155 - protein, 10 aa, Artificial Sequence
  Description of Artificial Sequence: Synthetic peptide
  XENP020683 vhCDR3
LANWDWYFDV

SEQ ID NO: 25156 - protein, 218 aa, Artificial Sequence
  Description of Artificial Sequence: Synthetic polypeptide
  XENP020683 7G8_H0_L0.79_IgG1_PVA_/S267K Light Chain
DTVLTQSPASLAVSLGQRATISCKASQSVDYDGDSYMNWYQQKPGQPPKLLIYAASNLESGIPARLSGSGSGTDFTLNIHPVEEEDAATYYCQQHNEDPFTFGSGTKLEVKRTVAAPSVFIFPPSDEQLKSGTASVVCLLNNFYPREAKVQWKVDNALQSGNSQESVTEQDSKDSTYSLSSTLTLSKADYEKHKVYACEVTHQGLSSPVTKSFNRGEC

SEQ ID NO: 25157 - protein, 111 aa, Artificial Sequence
  Description of Artificial Sequence: Synthetic polypeptide
  VL of XENP020683
DTVLTQSPASLAVSLGQRATISCKASQSVDYDGDSYMNWYQQKPGQPPKLLIYAASNLESGIPARLSGSGSGTDFTLNIHPVEEEDAATYYCQQHNEDPFTFGSGTKLEVK

SEQ ID NO: 25158 - protein, 15 aa, Artificial Sequence
  Description of Artificial Sequence: Synthetic peptide
  XENP020683 vlCDR1
KASQSVDYDGDSYMN

SEQ ID NO: 25159 - protein, 7 aa, Artificial Sequence
  Description of Artificial Sequence: Synthetic peptide
  XENP020683 vlCDR2
AASNLES

SEQ ID NO: 25160 - protein, 9 aa, Artificial Sequence
  Description of Artificial Sequence: Synthetic peptide
  XENP020683 vlCDR3
QQHNEDPFT

SEQ ID NO: 25161 - protein, 450 aa, Artificial Sequence; identical to SEQ ID NO: 22261
  Description of Artificial Sequence: Synthetic polypeptide
  XENP020684 7G8_H0_L0.80_IgG1_PVA_/S267K Heavy Chain

SEQ ID NO: 25162 - protein, 121 aa, Artificial Sequence; identical to SEQ ID NO: 22262
  Description of Artificial Sequence: Synthetic polypeptide
  VH of XENP020684

SEQ ID NO: 25163 - protein, 5 aa, Artificial Sequence
  Description of Artificial Sequence: Synthetic peptide
  XENP020684 vhCDR1
DAWMD

SEQ ID NO: 25164 - protein, 19 aa, Artificial Sequence
  Description of Artificial Sequence: Synthetic peptide
  XENP020684 vhCDR2
EIRTKANNHATYYAESVKG

SEQ ID NO: 25165 - protein, 10 aa, Artificial Sequence
  Description of Artificial Sequence: Synthetic peptide
  XENP020684 vhCDR3
LANWDWYFDV

SEQ ID NO: 25166 - protein, 218 aa, Artificial Sequence
  Description of Artificial Sequence: Synthetic polypeptide
  XENP020684 7G8_H0_L0.80_IgG1_PVA_/S267K Light Chain
DTVLTQSPASLAVSLGQRATISCKASQSVDYDGDSYMNWYQQKPGQPPKLLIYAASNLESGIPARLSGSGSGTDFTLNIHPVEEEDAATYYCQQDNEDPFTFGSGTKLEVKRTVAAPSVFIFPPSDEQLKSGTASVVCLLNNFYPREAKVQWKVDNALQSGNSQESVTEQDSKDSTYSLSSTLTLSKADYEKHKVYACEVTHQGLSSPVTKSFNRGEC

SEQ ID NO: 25167 - protein, 111 aa, Artificial Sequence
  Description of Artificial Sequence: Synthetic polypeptide
  VL of XENP020684
DTVLTQSPASLAVSLGQRATISCKASQSVDYDGDSYMNWYQQKPGQPPKLLIYAASNLESGIPARLSGSGSGTDFTLNIHPVEEEDAATYYCQQDNEDPFTFGSGTKLEVK

SEQ ID NO: 25168 - protein, 15 aa, Artificial Sequence
  Description of Artificial Sequence: Synthetic peptide
  XENP020684 vlCDR1
KASQSVDYDGDSYMN

SEQ ID NO: 25169 - protein, 7 aa, Artificial Sequence
  Description of Artificial Sequence: Synthetic peptide
  XENP020684 vlCDR2
AASNLES

SEQ ID NO: 25170 - protein, 9 aa, Artificial Sequence
  Description of Artificial Sequence: Synthetic peptide
  XENP020684 vlCDR3
QQDNEDPFT

SEQ ID NO: 25171 - protein, 450 aa, Artificial Sequence; identical to SEQ ID NO: 22261
  Description of Artificial Sequence: Synthetic polypeptide
  XENP020685 7G8_H0_L0.81_IgG1_PVA_/S267K Heavy Chain

SEQ ID NO: 25172 - protein, 121 aa, Artificial Sequence; identical to SEQ ID NO: 22262
  Description of Artificial Sequence: Synthetic polypeptide
  VH of XENP020685

SEQ ID NO: 25173 - protein, 5 aa, Artificial Sequence
  Description of Artificial Sequence: Synthetic peptide
  XENP020685 vhCDR1
DAWMD

SEQ ID NO: 25174 - protein, 19 aa, Artificial Sequence
  Description of Artificial Sequence: Synthetic peptide
  XENP020685 vhCDR2
EIRTKANNHATYYAESVKG

SEQ ID NO: 25175 - protein, 10 aa, Artificial Sequence
  Description of Artificial Sequence: Synthetic peptide
  XENP020685 vhCDR3
LANWDWYFDV

SEQ ID NO: 25176 - protein, 218 aa, Artificial Sequence
  Description of Artificial Sequence: Synthetic polypeptide
  XENP020685 7G8_H0_L0.81_IgG1_PVA_/S267K Light Chain
DTVLTQSPASLAVSLGQRATISCKASQSVDYDGDSYMNWYQQKPGQPPKLLIYAASNLESGIPARLSGSGSGTDFTLNIHPVEEEDAATYYCQQKNEDPFTFGSGTKLEVKRTVAAPSVFIFPPSDEQLKSGTASVVCLLNNFYPREAKVQWKVDNALQSGNSQESVTEQDSKDSTYSLSSTLTLSKADYEKHKVYACEVTHQGLSSPVTKSFNRGEC

SEQ ID NO: 25177 - protein, 111 aa, Artificial Sequence
  Description of Artificial Sequence: Synthetic polypeptide
  VL of XENP020685
DTVLTQSPASLAVSLGQRATISCKASQSVDYDGDSYMNWYQQKPGQPPKLLIYAASNLESGIPARLSGSGSGTDFTLNIHPVEEEDAATYYCQQKNEDPFTFGSGTKLEVK

SEQ ID NO: 25178 - protein, 15 aa, Artificial Sequence
  Description of Artificial Sequence: Synthetic peptide
  XENP020685 vlCDR1
KASQSVDYDGDSYMN

SEQ ID NO: 25179 - protein, 7 aa, Artificial Sequence
  Description of Artificial Sequence: Synthetic peptide
  XENP020685 vlCDR2
AASNLES

SEQ ID NO: 25180 - protein, 9 aa, Artificial Sequence
  Description of Artificial Sequence: Synthetic peptide
  XENP020685 vlCDR3
QQKNEDPFT

SEQ ID NO: 25181 - protein, 450 aa, Artificial Sequence; identical to SEQ ID NO: 22261
  Description of Artificial Sequence: Synthetic polypeptide
  XENP020686 7G8_H0_L0.82_IgG1_PVA_/S267K Heavy Chain

SEQ ID NO: 25182 - protein, 121 aa, Artificial Sequence; identical to SEQ ID NO: 22262
  Description of Artificial Sequence: Synthetic polypeptide
  VH of XENP020686

SEQ ID NO: 25183 - protein, 5 aa, Artificial Sequence
  Description of Artificial Sequence: Synthetic peptide
  XENP020686 vhCDR1
DAWMD

SEQ ID NO: 25184 - protein, 19 aa, Artificial Sequence
  Description of Artificial Sequence: Synthetic peptide
  XENP020686 vhCDR2
EIRTKANNHATYYAESVKG

SEQ ID NO: 25185 - protein, 10 aa, Artificial Sequence
  Description of Artificial Sequence: Synthetic peptide
  XENP020686 vhCDR3
LANWDWYFDV

SEQ ID NO: 25186 - protein, 218 aa, Artificial Sequence
  Description of Artificial Sequence: Synthetic polypeptide
  XENP020686 7G8_H0_L0.82_IgG1_PVA_/S267K Light Chain
DTVLTQSPASLAVSLGQRATISCKASQSVDYDGDSYMNWYQQKPGQPPKLLIYAASNLESGIPARLSGSGSGTDFTLNIHPVEEEDAATYYCQQYNEDPFTFGSGTKLEVKRTVAAPSVFIFPPSDEQLKSGTASVVCLLNNFYPREAKVQWKVDNALQSGNSQESVTEQDSKDSTYSLSSTLTLSKADYEKHKVYACEVTHQGLSSPVTKSFNRGEC

SEQ ID NO: 25187 - protein, 111 aa, Artificial Sequence
  Description of Artificial Sequence: Synthetic polypeptide
  VL of XENP020686
DTVLTQSPASLAVSLGQRATISCKASQSVDYDGDSYMNWYQQKPGQPPKLLIYAASNLESGIPARLSGSGSGTDFTLNIHPVEEEDAATYYCQQYNEDPFTFGSGTKLEVK

SEQ ID NO: 25188 - protein, 15 aa, Artificial Sequence
  Description of Artificial Sequence: Synthetic peptide
  XENP020686 vlCDR1
KASQSVDYDGDSYMN

SEQ ID NO: 25189 - protein, 7 aa, Artificial Sequence
  Description of Artificial Sequence: Synthetic peptide
  XENP020686 vlCDR2
AASNLES

SEQ ID NO: 25190 - protein, 9 aa, Artificial Sequence
  Description of Artificial Sequence: Synthetic peptide
  XENP020686 vlCDR3
QQYNEDPFT

SEQ ID NO: 25191 - protein, 450 aa, Artificial Sequence; identical to SEQ ID NO: 22261
  Description of Artificial Sequence: Synthetic polypeptide
  XENP020687 7G8_H0_L0.83_IgG1_PVA_/S267K Heavy Chain

SEQ ID NO: 25192 - protein, 121 aa, Artificial Sequence; identical to SEQ ID NO: 22262
  Description of Artificial Sequence: Synthetic polypeptide
  VH of XENP020687

SEQ ID NO: 25193 - protein, 5 aa, Artificial Sequence
  Description of Artificial Sequence: Synthetic peptide
  XENP020687 vhCDR1
DAWMD

SEQ ID NO: 25194 - protein, 19 aa, Artificial Sequence
  Description of Artificial Sequence: Synthetic peptide
  XENP020687 vhCDR2
EIRTKANNHATYYAESVKG

SEQ ID NO: 25195 - protein, 10 aa, Artificial Sequence
  Description of Artificial Sequence: Synthetic peptide
  XENP020687 vhCDR3
LANWDWYFDV

SEQ ID NO: 25196 - protein, 218 aa, Artificial Sequence
  Description of Artificial Sequence: Synthetic polypeptide
  XENP020687 7G8_H0_L0.83_IgG1_PVA_/S267K Light Chain
DTVLTQSPASLAVSLGQRATISCKASQSVDYDGDSYMNWYQQKPGQPPKLLIYAASNLESGIPARLSGSGSGTDFTLNIHPVEEEDAATYYCQQSDEDPFTFGSGTKLEVKRTVAAPSVFIFPPSDEQLKSGTASVVCLLNNFYPREAKVQWKVDNALQSGNSQESVTEQDSKDSTYSLSSTLTLSKADYEKHKVYACEVTHQGLSSPVTKSFNRGEC

SEQ ID NO: 25197 - protein, 111 aa, Artificial Sequence
  Description of Artificial Sequence: Synthetic polypeptide
  VL of XENP020687
DTVLTQSPASLAVSLGQRATISCKASQSVDYDGDSYMNWYQQKPGQPPKLLIYAASNLESGIPARLSGSGSGTDFTLNIHPVEEEDAATYYCQQSDEDPFTFGSGTKLEVK

SEQ ID NO: 25198 - protein, 15 aa, Artificial Sequence
  Description of Artificial Sequence: Synthetic peptide
  XENP020687 vlCDR1
KASQSVDYDGDSYMN

SEQ ID NO: 25199 - protein, 7 aa, Artificial Sequence
  Description of Artificial Sequence: Synthetic peptide
  XENP020687 vlCDR2
AASNLES

SEQ ID NO: 25200 - protein, 9 aa, Artificial Sequence
  Description of Artificial Sequence: Synthetic peptide
  XENP020687 vlCDR3
QQSDEDPFT

SEQ ID NO: 25201 - protein, 450 aa, Artificial Sequence; identical to SEQ ID NO: 22261
  Description of Artificial Sequence: Synthetic polypeptide
  XENP020688 7G8_H0_L0.84_IgG1_PVA_/S267K Heavy Chain

SEQ ID NO: 25202 - protein, 121 aa, Artificial Sequence; identical to SEQ ID NO: 22262
  Description of Artificial Sequence: Synthetic polypeptide
  VH of XENP020688

SEQ ID NO: 25203 - protein, 5 aa, Artificial Sequence
  Description of Artificial Sequence: Synthetic peptide
  XENP020688 vhCDR1
DAWMD

SEQ ID NO: 25204 - protein, 19 aa, Artificial Sequence
  Description of Artificial Sequence: Synthetic peptide
  XENP020688 vhCDR2
EIRTKANNHATYYAESVKG

SEQ ID NO: 25205 - protein, 10 aa, Artificial Sequence
  Description of Artificial Sequence: Synthetic peptide
  XENP020688 vhCDR3
LANWDWYFDV

SEQ ID NO: 25206 - protein, 218 aa, Artificial Sequence
  Description of Artificial Sequence: Synthetic polypeptide
  XENP020688 7G8_H0_L0.84_IgG1_PVA_/S267K Light Chain
DTVLTQSPASLAVSLGQRATISCKASQSVDYDGDSYMNWYQQKPGQPPKLLIYAASNLESGIPARLSGSGSGTDFTLNIHPVEEEDAATYYCQQSHEDPFTFGSGTKLEVKRTVAAPSVFIFPPSDEQLKSGTASVVCLLNNFYPREAKVQWKVDNALQSGNSQESVTEQDSKDSTYSLSSTLTLSKADYEKHKVYACEVTHQGLSSPVTKSFNRGEC

SEQ ID NO: 25207 - protein, 111 aa, Artificial Sequence
  Description of Artificial Sequence: Synthetic polypeptide
  VL of XENP020688
DTVLTQSPASLAVSLGQRATISCKASQSVDYDGDSYMNWYQQKPGQPPKLLIYAASNLESGIPARLSGSGSGTDFTLNIHPVEEEDAATYYCQQSHEDPFTFGSGTKLEVK

SEQ ID NO: 25208 - protein, 15 aa, Artificial Sequence
  Description of Artificial Sequence: Synthetic peptide
  XENP020688 vlCDR1
KASQSVDYDGDSYMN

SEQ ID NO: 25209 - protein, 7 aa, Artificial Sequence
  Description of Artificial Sequence: Synthetic peptide
  XENP020688 vlCDR2
AASNLES

SEQ ID NO: 25210 - protein, 9 aa, Artificial Sequence
  Description of Artificial Sequence: Synthetic peptide
  XENP020688 vlCDR3
QQSHEDPFT

SEQ ID NO: 25211 - protein, 450 aa, Artificial Sequence; identical to SEQ ID NO: 22261
  Description of Artificial Sequence: Synthetic polypeptide
  XENP020689 7G8_H0_L0.85_IgG1_PVA_/S267K Heavy Chain

SEQ ID NO: 25212 - protein, 121 aa, Artificial Sequence; identical to SEQ ID NO: 22262
  Description of Artificial Sequence: Synthetic polypeptide
  VH of XENP020689

SEQ ID NO: 25213 - protein, 5 aa, Artificial Sequence
  Description of Artificial Sequence: Synthetic peptide
  XENP020689 vhCDR1
DAWMD

SEQ ID NO: 25214 - protein, 19 aa, Artificial Sequence
  Description of Artificial Sequence: Synthetic peptide
  XENP020689 vhCDR2
EIRTKANNHATYYAESVKG

SEQ ID NO: 25215 - protein, 10 aa, Artificial Sequence
  Description of Artificial Sequence: Synthetic peptide
  XENP020689 vhCDR3
LANWDWYFDV

SEQ ID NO: 25216 - protein, 218 aa, Artificial Sequence
  Description of Artificial Sequence: Synthetic polypeptide
  XENP020689 7G8_H0_L0.85_IgG1_PVA_/S267K Light Chain
DTVLTQSPASLAVSLGQRATISCKASQSVDYDGDSYMNWYQQKPGQPPKLLIYAASNLESGIPARLSGSGSGTDFTLNIHPVEEEDAATYYCQQSEEDPFTFGSGTKLEVKRTVAAPSVFIFPPSDEQLKSGTASVVCLLNNFYPREAKVQWKVDNALQSGNSQESVTEQDSKDSTYSLSSTLTLSKADYEKHKVYACEVTHQGLSSPVTKSFNRGEC

SEQ ID NO: 25217 - protein, 111 aa, Artificial Sequence
  Description of Artificial Sequence: Synthetic polypeptide
  VL of XENP020689
DTVLTQSPASLAVSLGQRATISCKASQSVDYDGDSYMNWYQQKPGQPPKLLIYAASNLESGIPARLSGSGSGTDFTLNIHPVEEEDAATYYCQQSEEDPFTFGSGTKLEVK

SEQ ID NO: 25218 - protein, 15 aa, Artificial Sequence
  Description of Artificial Sequence: Synthetic peptide
  XENP020689 vlCDR1
KASQSVDYDGDSYMN

SEQ ID NO: 25219 - protein, 7 aa, Artificial Sequence
  Description of Artificial Sequence: Synthetic peptide
  XENP020689 vlCDR2
AASNLES

SEQ ID NO: 25220 - protein, 9 aa, Artificial Sequence
  Description of Artificial Sequence: Synthetic peptide
  XENP020689 vlCDR3
QQSEEDPFT

SEQ ID NO: 25221 - protein, 450 aa, Artificial Sequence; identical to SEQ ID NO: 22261
  Description of Artificial Sequence: Synthetic polypeptide
  XENP020690 7G8_H0_L0.86_IgG1_PVA_/S267K Heavy Chain

SEQ ID NO: 25222 - protein, 121 aa, Artificial Sequence; identical to SEQ ID NO: 22262
  Description of Artificial Sequence: Synthetic polypeptide
  VH of XENP020690

SEQ ID NO: 25223 - protein, 5 aa, Artificial Sequence
  Description of Artificial Sequence: Synthetic peptide
  XENP020690 vhCDR1
DAWMD

SEQ ID NO: 25224 - protein, 19 aa, Artificial Sequence
  Description of Artificial Sequence: Synthetic peptide
  XENP020690 vhCDR2
EIRTKANNHATYYAESVKG

SEQ ID NO: 25225 - protein, 10 aa, Artificial Sequence
  Description of Artificial Sequence: Synthetic peptide
  XENP020690 vhCDR3
LANWDWYFDV

SEQ ID NO: 25226 - protein, 218 aa, Artificial Sequence
  Description of Artificial Sequence: Synthetic polypeptide
  XENP020690 7G8_H0_L0.86_IgG1_PVA_/S267K Light Chain
DTVLTQSPASLAVSLGQRATISCKASQSVDYDGDSYMNWYQQKPGQPPKLLIYAASNLESGIPARLSGSGSGTDFTLNIHPVEEEDAATYYCQQSSEDPFTFGSGTKLEVKRTVAAPSVFIFPPSDEQLKSGTASVVCLLNNFYPREAKVQWKVDNALQSGNSQESVTEQDSKDSTYSLSSTLTLSKADYEKHKVYACEVTHQGLSSPVTKSFNRGEC

SEQ ID NO: 25227 - protein, 111 aa, Artificial Sequence
  Description of Artificial Sequence: Synthetic polypeptide
  VL of XENP020690
DTVLTQSPASLAVSLGQRATISCKASQSVDYDGDSYMNWYQQKPGQPPKLLIYAASNLESGIPARLSGSGSGTDFTLNIHPVEEEDAATYYCQQSSEDPFTFGSGTKLEVK

SEQ ID NO: 25228 - protein, 15 aa, Artificial Sequence
  Description of Artificial Sequence: Synthetic peptide
  XENP020690 vlCDR1
KASQSVDYDGDSYMN

SEQ ID NO: 25229 - protein, 7 aa, Artificial Sequence
  Description of Artificial Sequence: Synthetic peptide
  XENP020690 vlCDR2
AASNLES

SEQ ID NO: 25230 - protein, 9 aa, Artificial Sequence
  Description of Artificial Sequence: Synthetic peptide
  XENP020690 vlCDR3
QQSSEDPFT

SEQ ID NO: 25231 - protein, 450 aa, Artificial Sequence; identical to SEQ ID NO: 22261
  Description of Artificial Sequence: Synthetic polypeptide
  XENP020691 7G8_H0_L0.87_IgG1_PVA_/S267K Heavy Chain

SEQ ID NO: 25232 - protein, 121 aa, Artificial Sequence; identical to SEQ ID NO: 22262
  Description of Artificial Sequence: Synthetic polypeptide
  VH of XENP020691

SEQ ID NO: 25233 - protein, 5 aa, Artificial Sequence
  Description of Artificial Sequence: Synthetic peptide
  XENP020691 vhCDR1
DAWMD

SEQ ID NO: 25234 - protein, 19 aa, Artificial Sequence
  Description of Artificial Sequence: Synthetic peptide
  XENP020691 vhCDR2
EIRTKANNHATYYAESVKG

SEQ ID NO: 25235 - protein, 10 aa, Artificial Sequence
  Description of Artificial Sequence: Synthetic peptide
  XENP020691 vhCDR3
LANWDWYFDV

SEQ ID NO: 25236 - protein, 218 aa, Artificial Sequence
  Description of Artificial Sequence: Synthetic polypeptide
  XENP020691 7G8_H0_L0.87_IgG1_PVA_/S267K Light Chain
DTVLTQSPASLAVSLGQRATISCKASQSVDYDGDSYMNWYQQKPGQPPKLLIYAASNLESGIPARLSGSGSGTDFTLNIHPVEEEDAATYYCQQSREDPFTFGSGTKLEVKRTVAAPSVFIFPPSDEQLKSGTASVVCLLNNFYPREAKVQWKVDNALQSGNSQESVTEQDSKDSTYSLSSTLTLSKADYEKHKVYACEVTHQGLSSPVTKSFNRGEC

SEQ ID NO: 25237 - protein, 111 aa, Artificial Sequence
  Description of Artificial Sequence: Synthetic polypeptide
  VL of XENP020691
DTVLTQSPASLAVSLGQRATISCKASQSVDYDGDSYMNWYQQKPGQPPKLLIYAASNLESGIPARLSGSGSGTDFTLNIHPVEEEDAATYYCQQSREDPFTFGSGTKLEVK

SEQ ID NO: 25238 - protein, 15 aa, Artificial Sequence
  Description of Artificial Sequence: Synthetic peptide
  XENP020691 vlCDR1
KASQSVDYDGDSYMN

SEQ ID NO: 25239 - protein, 7 aa, Artificial Sequence
  Description of Artificial Sequence: Synthetic peptide
  XENP020691 vlCDR2
AASNLES

SEQ ID NO: 25240 - protein, 9 aa, Artificial Sequence
  Description of Artificial Sequence: Synthetic peptide
  XENP020691 vlCDR3
QQSREDPFT

SEQ ID NO: 25241 - protein, 450 aa, Artificial Sequence; identical to SEQ ID NO: 22261
  Description of Artificial Sequence: Synthetic polypeptide
  XENP020692 7G8_H0_L0.88_IgG1_PVA_/S267K Heavy Chain

SEQ ID NO: 25242 - protein, 121 aa, Artificial Sequence; identical to SEQ ID NO: 22262
  Description of Artificial Sequence: Synthetic polypeptide
  VH of XENP020692

SEQ ID NO: 25243 - protein, 5 aa, Artificial Sequence
  Description of Artificial Sequence: Synthetic peptide
  XENP020692 vhCDR1
DAWMD

SEQ ID NO: 25244 - protein, 19 aa, Artificial Sequence
  Description of Artificial Sequence: Synthetic peptide
  XENP020692 vhCDR2
EIRTKANNHATYYAESVKG

SEQ ID NO: 25245 - protein, 10 aa, Artificial Sequence
  Description of Artificial Sequence: Synthetic peptide
  XENP020692 vhCDR3
LANWDWYFDV

SEQ ID NO: 25246 - protein, 218 aa, Artificial Sequence
  Description of Artificial Sequence: Synthetic polypeptide
  XENP020692 7G8_H0_L0.88_IgG1_PVA_/S267K Light Chain
DTVLTQSPASLAVSLGQRATISCKASQSVDYDGDSYMNWYQQKPGQPPKLLIYAASNLESGIPARLSGSGSGTDFTLNIHPVEEEDAATYYCQQSLEDPFTFGSGTKLEVKRTVAAPSVFIFPPSDEQLKSGTASVVCLLNNFYPREAKVQWKVDNALQSGNSQESVTEQDSKDSTYSLSSTLTLSKADYEKHKVYACEVTHQGLSSPVTKSFNRGEC

SEQ ID NO: 25247 - protein, 111 aa, Artificial Sequence
  Description of Artificial Sequence: Synthetic polypeptide
  VL of XENP020692
DTVLTQSPASLAVSLGQRATISCKASQSVDYDGDSYMNWYQQKPGQPPKLLIYAASNLESGIPARLSGSGSGTDFTLNIHPVEEEDAATYYCQQSLEDPFTFGSGTKLEVK

SEQ ID NO: 25248 - protein, 15 aa, Artificial Sequence
  Description of Artificial Sequence: Synthetic peptide
  XENP020692 vlCDR1
KASQSVDYDGDSYMN

SEQ ID NO: 25249 - protein, 7 aa, Artificial Sequence
  Description of Artificial Sequence: Synthetic peptide
  XENP020692 vlCDR2
AASNLES

SEQ ID NO: 25250 - protein, 9 aa, Artificial Sequence
  Description of Artificial Sequence: Synthetic peptide
  XENP020692 vlCDR3
QQSLEDPFT

SEQ ID NO: 25251 - protein, 450 aa, Artificial Sequence; identical to SEQ ID NO: 22261
  Description of Artificial Sequence: Synthetic polypeptide
  XENP020693 7G8_H0_L0.89_IgG1_PVA_/S267K Heavy Chain

SEQ ID NO: 25252 - protein, 121 aa, Artificial Sequence; identical to SEQ ID NO: 22262
  Description of Artificial Sequence: Synthetic polypeptide
  VH of XENP020693

SEQ ID NO: 25253 - protein, 5 aa, Artificial Sequence
  Description of Artificial Sequence: Synthetic peptide
  XENP020693 vhCDR1
DAWMD

SEQ ID NO: 25254 - protein, 19 aa, Artificial Sequence
  Description of Artificial Sequence: Synthetic peptide
  XENP020693 vhCDR2
EIRTKANNHATYYAESVKG

SEQ ID NO: 25255 - protein, 10 aa, Artificial Sequence
  Description of Artificial Sequence: Synthetic peptide
  XENP020693 vhCDR3
LANWDWYFDV

SEQ ID NO: 25256 - protein, 218 aa, Artificial Sequence
  Description of Artificial Sequence: Synthetic polypeptide
  XENP020693 7G8_H0_L0.89_IgG1_PVA_/S267K Light Chain
DTVLTQSPASLAVSLGQRATISCKASQSVDYDGDSYMNWYQQKPGQPPKLLIYAASNLESGIPARLSGSGSGTDFTLNIHPVEEEDAATYYCQQSTEDPFTFGSGTKLEVKRTVAAPSVFIFPPSDEQLKSGTASVVCLLNNFYPREAKVQWKVDNALQSGNSQESVTEQDSKDSTYSLSSTLTLSKADYEKHKVYACEVTHQGLSSPVTKSFNRGEC

SEQ ID NO: 25257 - protein, 111 aa, Artificial Sequence
  Description of Artificial Sequence: Synthetic polypeptide
  VL of XENP020693
DTVLTQSPASLAVSLGQRATISCKASQSVDYDGDSYMNWYQQKPGQPPKLLIYAASNLESGIPARLSGSGSGTDFTLNIHPVEEEDAATYYCQQSTEDPFTFGSGTKLEVK

SEQ ID NO: 25258 - protein, 15 aa, Artificial Sequence
  Description of Artificial Sequence: Synthetic peptide
  XENP020693 vlCDR1
KASQSVDYDGDSYMN

SEQ ID NO: 25259 - protein, 7 aa, Artificial Sequence
  Description of Artificial Sequence: Synthetic peptide
  XENP020693 vlCDR2
AASNLES

SEQ ID NO: 25260 - protein, 9 aa, Artificial Sequence
  Description of Artificial Sequence: Synthetic peptide
  XENP020693 vlCDR3
QQSTEDPFT

SEQ ID NO: 25261 - protein, 450 aa, Artificial Sequence; identical to SEQ ID NO: 22261
  Description of Artificial Sequence: Synthetic polypeptide
  XENP020694 7G8_H0_L0.90_IgG1_PVA_/S267K Heavy Chain

SEQ ID NO: 25262 - protein, 121 aa, Artificial Sequence; identical to SEQ ID NO: 22262
  Description of Artificial Sequence: Synthetic polypeptide
  VH of XENP020694

SEQ ID NO: 25263 - protein, 5 aa, Artificial Sequence
  Description of Artificial Sequence: Synthetic peptide
  XENP020694 vhCDR1
DAWMD

SEQ ID NO: 25264 - protein, 19 aa, Artificial Sequence
  Description of Artificial Sequence: Synthetic peptide
  XENP020694 vhCDR2
EIRTKANNHATYYAESVKG

SEQ ID NO: 25265 - protein, 10 aa, Artificial Sequence
  Description of Artificial Sequence: Synthetic peptide
  XENP020694 vhCDR3
LANWDWYFDV

SEQ ID NO: 25266 - protein, 218 aa, Artificial Sequence
  Description of Artificial Sequence: Synthetic polypeptide
  XENP020694 7G8_H0_L0.90_IgG1_PVA_/S267K Light Chain
DTVLTQSPASLAVSLGQRATISCKASQSVDYDGDSYMNWYQQKPGQPPKLLIYAASNLESGIPARLSGSGSGTDFTLNIHPVEEEDAATYYCQQSGEDPFTFGSGTKLEVKRTVAAPSVFIFPPSDEQLKSGTASVVCLLNNFYPREAKVQWKVDNALQSGNSQESVTEQDSKDSTYSLSSTLTLSKADYEKHKVYACEVTHQGLSSPVTKSFNRGEC

SEQ ID NO: 25267 - protein, 111 aa, Artificial Sequence
  Description of Artificial Sequence: Synthetic polypeptide
  VL of XENP020694
DTVLTQSPASLAVSLGQRATISCKASQSVDYDGDSYMNWYQQKPGQPPKLLIYAASNLESGIPARLSGSGSGTDFTLNIHPVEEEDAATYYCQQSGEDPFTFGSGTKLEVK

SEQ ID NO: 25268 - protein, 15 aa, Artificial Sequence
  Description of Artificial Sequence: Synthetic peptide
  XENP020694 vlCDR1
KASQSVDYDGDSYMN

SEQ ID NO: 25269 - protein, 7 aa, Artificial Sequence
  Description of Artificial Sequence: Synthetic peptide
  XENP020694 vlCDR2
AASNLES

SEQ ID NO: 25270 - protein, 9 aa, Artificial Sequence
  Description of Artificial Sequence: Synthetic peptide
  XENP020694 vlCDR3
QQSGEDPFT

SEQ ID NO: 25271 - protein, 450 aa, Artificial Sequence; identical to SEQ ID NO: 22261
  Description of Artificial Sequence: Synthetic polypeptide
  XENP020695 7G8_H0_L0.91_IgG1_PVA_/S267K Heavy Chain

SEQ ID NO: 25272 - protein, 121 aa, Artificial Sequence; identical to SEQ ID NO: 22262
  Description of Artificial Sequence: Synthetic polypeptide
  VH of XENP020695

SEQ ID NO: 25273 - protein, 5 aa, Artificial Sequence
  Description of Artificial Sequence: Synthetic peptide
  XENP020695 vhCDR1
DAWMD

SEQ ID NO: 25274 - protein, 19 aa, Artificial Sequence
  Description of Artificial Sequence: Synthetic peptide
  XENP020695 vhCDR2
EIRTKANNHATYYAESVKG

SEQ ID NO: 25275 - protein, 10 aa, Artificial Sequence
  Description of Artificial Sequence: Synthetic peptide
  XENP020695 vhCDR3
LANWDWYFDV

SEQ ID NO: 25276 - protein, 218 aa, Artificial Sequence
  Description of Artificial Sequence: Synthetic polypeptide
  XENP020695 7G8_H0_L0.91_IgG1_PVA_/S267K Light Chain
DTVLTQSPASLAVSLGQRATISCKASQSVDYDGDSYMNWYQQKPGQPPKLLIYAASNLESGIPARLSGSGSGTDFTLNIHPVEEEDAATYYCQQSYEDPFTFGSGTKLEVKRTVAAPSVFIFPPSDEQLKSGTASVVCLLNNFYPREAKVQWKVDNALQSGNSQESVTEQDSKDSTYSLSSTLTLSKADYEKHKVYACEVTHQGLSSPVTKSFNRGEC

SEQ ID NO: 25277 - protein, 111 aa, Artificial Sequence
  Description of Artificial Sequence: Synthetic polypeptide
  VL of XENP020695
DTVLTQSPASLAVSLGQRATISCKASQSVDYDGDSYMNWYQQKPGQPPKLLIYAASNLESGIPARLSGSGSGTDFTLNIHPVEEEDAATYYCQQSYEDPFTFGSGTKLEVK

SEQ ID NO: 25278 - protein, 15 aa, Artificial Sequence
  Description of Artificial Sequence: Synthetic peptide
  XENP020695 vlCDR1
KASQSVDYDGDSYMN

SEQ ID NO: 25279 - protein, 7 aa, Artificial Sequence
  Description of Artificial Sequence: Synthetic peptide
  XENP020695 vlCDR2
AASNLES

SEQ ID NO: 25280 - protein, 9 aa, Artificial Sequence
  Description of Artificial Sequence: Synthetic peptide
  XENP020695 vlCDR3
QQSYEDPFT

SEQ ID NO: 25281 - protein, 450 aa, Artificial Sequence; identical to SEQ ID NO: 22261
  Description of Artificial Sequence: Synthetic polypeptide
  XENP020696 7G8_H0_L0.92_IgG1_PVA_/S267K Heavy Chain

SEQ ID NO: 25282 - protein, 121 aa, Artificial Sequence; identical to SEQ ID NO: 22262
  Description of Artificial Sequence: Synthetic polypeptide
  VH of XENP020696

SEQ ID NO: 25283 - protein, 5 aa, Artificial Sequence
  Description of Artificial Sequence: Synthetic peptide
  XENP020696 vhCDR1
DAWMD

SEQ ID NO: 25284 - protein, 19 aa, Artificial Sequence
  Description of Artificial Sequence: Synthetic peptide
  XENP020696 vhCDR2
EIRTKANNHATYYAESVKG

SEQ ID NO: 25285 - protein, 10 aa, Artificial Sequence
  Description of Artificial Sequence: Synthetic peptide
  XENP020696 vhCDR3
LANWDWYFDV

SEQ ID NO: 25286 - protein, 218 aa, Artificial Sequence
  Description of Artificial Sequence: Synthetic polypeptide
  XENP020696 7G8_H0_L0.92_IgG1_PVA_/S267K Light Chain
DTVLTQSPASLAVSLGQRATISCKASQSVDYDGDSYMNWYQQKPGQPPKLLIYAASNLESGIPARLSGSGSGTDFTLNIHPVEEEDAATYYCQQSNQDPFTFGSGTKLEVKRTVAAPSVFIFPPSDEQLKSGTASVVCLLNNFYPREAKVQWKVDNALQSGNSQESVTEQDSKDSTYSLSSTLTLSKADYEKHKVYACEVTHQGLSSPVTKSFNRGEC

SEQ ID NO: 25287 - protein, 111 aa, Artificial Sequence
  Description of Artificial Sequence: Synthetic polypeptide
  VL of XENP020696
DTVLTQSPASLAVSLGQRATISCKASQSVDYDGDSYMNWYQQKPGQPPKLLIYAASNLESGIPARLSGSGSGTDFTLNIHPVEEEDAATYYCQQSNQDPFTFGSGTKLEVK

SEQ ID NO: 25288 - protein, 15 aa, Artificial Sequence
  Description of Artificial Sequence: Synthetic peptide
  XENP020696 vlCDR1
KASQSVDYDGDSYMN

SEQ ID NO: 25289 - protein, 7 aa, Artificial Sequence
  Description of Artificial Sequence: Synthetic peptide
  XENP020696 vlCDR2
AASNLES

SEQ ID NO: 25290 - protein, 9 aa, Artificial Sequence
  Description of Artificial Sequence: Synthetic peptide
  XENP020696 vlCDR3
QQSNQDPFT

SEQ ID NO: 25291 - protein, 450 aa, Artificial Sequence; identical to SEQ ID NO: 22261
  Description of Artificial Sequence: Synthetic polypeptide
  XENP020701 7G8_H0_L0.93_IgG1_PVA_/S267K Heavy Chain

SEQ ID NO: 25292 - protein, 121 aa, Artificial Sequence; identical to SEQ ID NO: 22262
  Description of Artificial Sequence: Synthetic polypeptide
  VH of XENP020701

SEQ ID NO: 25293 - protein, 5 aa, Artificial Sequence
  Description of Artificial Sequence: Synthetic peptide
  XENP020701 vhCDR1
DAWMD

SEQ ID NO: 25294 - protein, 19 aa, Artificial Sequence
  Description of Artificial Sequence: Synthetic peptide
  XENP020701 vhCDR2
EIRTKANNHATYYAESVKG

SEQ ID NO: 25295 - protein, 10 aa, Artificial Sequence
  Description of Artificial Sequence: Synthetic peptide
  XENP020701 vhCDR3
LANWDWYFDV

SEQ ID NO: 25296 - protein, 218 aa, Artificial Sequence
  Description of Artificial Sequence: Synthetic polypeptide
  XENP020701 7G8_H0_L0.93_IgG1_PVA_/S267K Light Chain
DTVLTQSPASLAVSLGQRATISCKASQSVDYDGDSYMNWYQQKPGQPPKLLIYAASNLESGIPARLSGSGSGTDFTLNIHPVEEEDAATYYCQQSNDDPFTFGSGTKLEVKRTVAAPSVFIFPPSDEQLKSGTASVVCLLNNFYPREAKVQWKVDNALQSGNSQESVTEQDSKDSTYSLSSTLTLSKADYEKHKVYACEVTHQGLSSPVTKSFNRGEC

SEQ ID NO: 25297 - protein, 111 aa, Artificial Sequence
  Description of Artificial Sequence: Synthetic polypeptide
  VL of XENP020701
DTVLTQSPASLAVSLGQRATISCKASQSVDYDGDSYMNWYQQKPGQPPKLLIYAASNLESGIPARLSGSGSGTDFTLNIHPVEEEDAATYYCQQSNDDPFTFGSGTKLEVK

SEQ ID NO: 25298 - protein, 15 aa, Artificial Sequence
  Description of Artificial Sequence: Synthetic peptide
  XENP020701 vlCDR1
KASQSVDYDGDSYMN

SEQ ID NO: 25299 - protein, 7 aa, Artificial Sequence
  Description of Artificial Sequence: Synthetic peptide
  XENP020701 vlCDR2
AASNLES

SEQ ID NO: 25300 - protein, 9 aa, Artificial Sequence
  Description of Artificial Sequence: Synthetic peptide
  XENP020701 vlCDR3
QQSNDDPFT

SEQ ID NO: 25301 - protein, 450 aa, Artificial Sequence; identical to SEQ ID NO: 22261
  Description of Artificial Sequence: Synthetic polypeptide
  XENP020702 7G8_H0_L0.94_IgG1_PVA_/S267K Heavy Chain

SEQ ID NO: 25302 - protein, 121 aa, Artificial Sequence; identical to SEQ ID NO: 22262
  Description of Artificial Sequence: Synthetic polypeptide
  VH of XENP020702

SEQ ID NO: 25303 - protein, 5 aa, Artificial Sequence
  Description of Artificial Sequence: Synthetic peptide
  XENP020702 vhCDR1
DAWMD

SEQ ID NO: 25304 - protein, 19 aa, Artificial Sequence
  Description of Artificial Sequence: Synthetic peptide
  XENP020702 vhCDR2
EIRTKANNHATYYAESVKG

SEQ ID NO: 25305 - protein, 10 aa, Artificial Sequence
  Description of Artificial Sequence: Synthetic peptide
  XENP020702 vhCDR3
LANWDWYFDV

SEQ ID NO: 25306 - protein, 218 aa, Artificial Sequence
  Description of Artificial Sequence: Synthetic polypeptide
  XENP020702 7G8_H0_L0.94_IgG1_PVA_/S267K Light Chain
DTVLTQSPASLAVSLGQRATISCKASQSVDYDGDSYMNWYQQKPGQPPKLLIYAASNLESGIPARLSGSGSGTDFTLNIHPVEEEDAATYYCQQSNKDPFTFGSGTKLEVKRTVAAPSVFIFPPSDEQLKSGTASVVCLLNNFYPREAKVQWKVDNALQSGNSQESVTEQDSKDSTYSLSSTLTLSKADYEKHKVYACEVTHQGLSSPVTKSFNRGEC

SEQ ID NO: 25307 - protein, 111 aa, Artificial Sequence
  Description of Artificial Sequence: Synthetic polypeptide
  VL of XENP020702
DTVLTQSPASLAVSLGQRATISCKASQSVDYDGDSYMNWYQQKPGQPPKLLIYAASNLESGIPARLSGSGSGTDFTLNIHPVEEEDAATYYCQQSNKDPFTFGSGTKLEVK

SEQ ID NO: 25308 - protein, 15 aa, Artificial Sequence
  Description of Artificial Sequence: Synthetic peptide
  XENP020702 vlCDR1
KASQSVDYDGDSYMN

SEQ ID NO: 25309 - protein, 7 aa, Artificial Sequence
  Description of Artificial Sequence: Synthetic peptide
  XENP020702 vlCDR2
AASNLES

SEQ ID NO: 25310 - protein, 9 aa, Artificial Sequence
  Description of Artificial Sequence: Synthetic peptide
  XENP020702 vlCDR3
QQSNKDPFT

SEQ ID NO: 25311 - protein, 450 aa, Artificial Sequence; identical to SEQ ID NO: 22261
  Description of Artificial Sequence: Synthetic polypeptide
  XENP020703 7G8_H0_L0.95_IgG1_PVA_/S267K Heavy Chain

SEQ ID NO: 25312 - protein, 121 aa, Artificial Sequence; identical to SEQ ID NO: 22262
  Description of Artificial Sequence: Synthetic polypeptide
  VH of XENP020703

SEQ ID NO: 25313 - protein, 5 aa, Artificial Sequence
  Description of Artificial Sequence: Synthetic peptide
  XENP020703 vhCDR1
DAWMD

SEQ ID NO: 25314 - protein, 19 aa, Artificial Sequence
  Description of Artificial Sequence: Synthetic peptide
  XENP020703 vhCDR2
EIRTKANNHATYYAESVKG

SEQ ID NO: 25315 - protein, 10 aa, Artificial Sequence
  Description of Artificial Sequence: Synthetic peptide
  XENP020703 vhCDR3
LANWDWYFDV

SEQ ID NO: 25316 - protein, 218 aa, Artificial Sequence
  Description of Artificial Sequence: Synthetic polypeptide
  XENP020703 7G8_H0_L0.95_IgG1_PVA_/S267K Light Chain
DTVLTQSPASLAVSLGQRATISCKASQSVDYDGDSYMNWYQQKPGQPPKLLIYAASNLESGIPARLSGSGSGTDFTLNIHPVEEEDAATYYCQQSNSDPFTFGSGTKLEVKRTVAAPSVFIFPPSDEQLKSGTASVVCLLNNFYPREAKVQWKVDNALQSGNSQESVTEQDSKDSTYSLSSTLTLSKADYEKHKVYACEVTHQGLSSPVTKSFNRGEC

SEQ ID NO: 25317 - protein, 111 aa, Artificial Sequence
  Description of Artificial Sequence: Synthetic polypeptide
  VL of XENP020703
DTVLTQSPASLAVSLGQRATISCKASQSVDYDGDSYMNWYQQKPGQPPKLLIYAASNLESGIPARLSGSGSGTDFTLNIHPVEEEDAATYYCQQSNSDPFTFGSGTKLEVK

SEQ ID NO: 25318 - protein, 15 aa, Artificial Sequence
  Description of Artificial Sequence: Synthetic peptide
  XENP020703 vlCDR1
KASQSVDYDGDSYMN

SEQ ID NO: 25319 - protein, 7 aa, Artificial Sequence
  Description of Artificial Sequence: Synthetic peptide
  XENP020703 vlCDR2
AASNLES

SEQ ID NO: 25320 - protein, 9 aa, Artificial Sequence
  Description of Artificial Sequence: Synthetic peptide
  XENP020703 vlCDR3
QQSNSDPFT

SEQ ID NO: 25321 - protein, 450 aa, Artificial Sequence; identical to SEQ ID NO: 22261
  Description of Artificial Sequence: Synthetic polypeptide
  XENP020704 7G8_H0_L0.96_IgG1_PVA_/S267K Heavy Chain

SEQ ID NO: 25322 - protein, 121 aa, Artificial Sequence; identical to SEQ ID NO: 22262
  Description of Artificial Sequence: Synthetic polypeptide
  VH of XENP020704

SEQ ID NO: 25323 - protein, 5 aa, Artificial Sequence
  Description of Artificial Sequence: Synthetic peptide
  XENP020704 vhCDR1
DAWMD

SEQ ID NO: 25324 - protein, 19 aa, Artificial Sequence
  Description of Artificial Sequence: Synthetic peptide
  XENP020704 vhCDR2
EIRTKANNHATYYAESVKG

SEQ ID NO: 25325 - protein, 10 aa, Artificial Sequence
  Description of Artificial Sequence: Synthetic peptide
  XENP020704 vhCDR3
LANWDWYFDV

SEQ ID NO: 25326 - protein, 218 aa, Artificial Sequence
  Description of Artificial Sequence: Synthetic polypeptide
  XENP020704 7G8_H0_L0.96_IgG1_PVA_/S267K Light Chain
DTVLTQSPASLAVSLGQRATISCKASQSVDYDGDSYMNWYQQKPGQPPKLLIYAASNLESGIPARLSGSGSGTDFTLNIHPVEEEDAATYYCQQSNHDPFTFGSGTKLEVKRTVAAPSVFIFPPSDEQLKSGTASVVCLLNNFYPREAKVQWKVDNALQSGNSQESVTEQDSKDSTYSLSSTLTLSKADYEKHKVYACEVTHQGLSSPVTKSFNRGEC

SEQ ID NO: 25327 - protein, 111 aa, Artificial Sequence
  Description of Artificial Sequence: Synthetic polypeptide
  VL of XENP020704
DTVLTQSPASLAVSLGQRATISCKASQSVDYDGDSYMNWYQQKPGQPPKLLIYAASNLESGIPARLSGSGSGTDFTLNIHPVEEEDAATYYCQQSNHDPFTFGSGTKLEVK

SEQ ID NO: 25328 - protein, 15 aa, Artificial Sequence
  Description of Artificial Sequence: Synthetic peptide
  XENP020704 vlCDR1
KASQSVDYDGDSYMN

SEQ ID NO: 25329 - protein, 7 aa, Artificial Sequence
  Description of Artificial Sequence: Synthetic peptide
  XENP020704 vlCDR2
AASNLES

SEQ ID NO: 25330 - protein, 9 aa, Artificial Sequence
  Description of Artificial Sequence: Synthetic peptide
  XENP020704 vlCDR3
QQSNHDPFT

SEQ ID NO: 25331 - protein, 450 aa, Artificial Sequence; identical to SEQ ID NO: 22261
  Description of Artificial Sequence: Synthetic polypeptide
  XENP020705 7G8_H0_L0.97_IgG1_PVA_/S267K Heavy Chain

SEQ ID NO: 25332 - protein, 121 aa, Artificial Sequence; identical to SEQ ID NO: 22262
  Description of Artificial Sequence: Synthetic polypeptide
  VH of XENP020705

SEQ ID NO: 25333 - protein, 5 aa, Artificial Sequence
  Description of Artificial Sequence: Synthetic peptide
  XENP020705 vhCDR1
DAWMD

SEQ ID NO: 25334 - protein, 19 aa, Artificial Sequence
  Description of Artificial Sequence: Synthetic peptide
  XENP020705 vhCDR2
EIRTKANNHATYYAESVKG

SEQ ID NO: 25335 - protein, 10 aa, Artificial Sequence
  Description of Artificial Sequence: Synthetic peptide
  XENP020705 vhCDR3
LANWDWYFDV

SEQ ID NO: 25336 - protein, 218 aa, Artificial Sequence
  Description of Artificial Sequence: Synthetic polypeptide
  XENP020705 7G8_H0_L0.97_IgG1_PVA_/S267K Light Chain
DTVLTQSPASLAVSLGQRATISCKASQSVDYDGDSYMNWYQQKPGQPPKLLIYAASNLESGIPARLSGSGSGTDFTLNIHPVEEEDAATYYCQQSNADPFTFGSGTKLEVKRTVAAPSVFIFPPSDEQLKSGTASVVCLLNNFYPREAKVQWKVDNALQSGNSQESVTEQDSKDSTYSLSSTLTLSKADYEKHKVYACEVTHQGLSSPVTKSFNRGEC

SEQ ID NO: 25337 - protein, 111 aa, Artificial Sequence
  Description of Artificial Sequence: Synthetic polypeptide
  VL of XENP020705
DTVLTQSPASLAVSLGQRATISCKASQSVDYDGDSYMNWYQQKPGQPPKLLIYAASNLESGIPARLSGSGSGTDFTLNIHPVEEEDAATYYCQQSNADPFTFGSGTKLEVK

SEQ ID NO: 25338 - protein, 15 aa, Artificial Sequence
  Description of Artificial Sequence: Synthetic peptide
  XENP020705 vlCDR1
KASQSVDYDGDSYMN

SEQ ID NO: 25339 - protein, 7 aa, Artificial Sequence
  Description of Artificial Sequence: Synthetic peptide
  XENP020705 vlCDR2
AASNLES

SEQ ID NO: 25340 - protein, 9 aa, Artificial Sequence
  Description of Artificial Sequence: Synthetic peptide
  XENP020705 vlCDR3
QQSNADPFT

SEQ ID NO: 25341 - protein, 450 aa, Artificial Sequence; identical to SEQ ID NO: 22261
  Description of Artificial Sequence: Synthetic polypeptide
  XENP020706 7G8_H0_L0.98_IgG1_PVA_/S267K Heavy Chain

SEQ ID NO: 25342 - protein, 121 aa, Artificial Sequence; identical to SEQ ID NO: 22262
  Description of Artificial Sequence: Synthetic polypeptide
  VH of XENP020706

SEQ ID NO: 25343 - protein, 5 aa, Artificial Sequence
  Description of Artificial Sequence: Synthetic peptide
  XENP020706 vhCDR1
DAWMD

SEQ ID NO: 25344 - protein, 19 aa, Artificial Sequence
  Description of Artificial Sequence: Synthetic peptide
  XENP020706 vhCDR2
EIRTKANNHATYYAESVKG

SEQ ID NO: 25345 - protein, 10 aa, Artificial Sequence
  Description of Artificial Sequence: Synthetic peptide
  XENP020706 vhCDR3
LANWDWYFDV

SEQ ID NO: 25346 - protein, 218 aa, Artificial Sequence
  Description of Artificial Sequence: Synthetic polypeptide
  XENP020706 7G8_H0_L0.98_IgG1_PVA_/S267K Light Chain
DTVLTQSPASLAVSLGQRATISCKASQSVDYDGDSYMNWYQQKPGQPPKLLIYAASNLESGIPARLSGSGSGTDFTLNIHPVEEEDAATYYCQQSNGDPFTFGSGTKLEVKRTVAAPSVFIFPPSDEQLKSGTASVVCLLNNFYPREAKVQWKVDNALQSGNSQESVTEQDSKDSTYSLSSTLTLSKADYEKHKVYACEVTHQGLSSPVTKSFNRGEC

SEQ ID NO: 25347 - protein, 111 aa, Artificial Sequence
  Description of Artificial Sequence: Synthetic polypeptide
  VL of XENP020706
DTVLTQSPASLAVSLGQRATISCKASQSVDYDGDSYMNWYQQKPGQPPKLLIYAASNLESGIPARLSGSGSGTDFTLNIHPVEEEDAATYYCQQSNGDPFTFGSGTKLEVK

SEQ ID NO: 25348 - protein, 15 aa, Artificial Sequence
  Description of Artificial Sequence: Synthetic peptide
  XENP020706 vlCDR1
KASQSVDYDGDSYMN

SEQ ID NO: 25349 - protein, 7 aa, Artificial Sequence
  Description of Artificial Sequence: Synthetic peptide
  XENP020706 vlCDR2
AASNLES

SEQ ID NO: 25350 - protein, 9 aa, Artificial Sequence
  Description of Artificial Sequence: Synthetic peptide
  XENP020706 vlCDR3
QQSNGDPFT

SEQ ID NO: 25351 - protein, 450 aa, Artificial Sequence; identical to SEQ ID NO: 22261
  Description of Artificial Sequence: Synthetic polypeptide
  XENP020707 7G8_H0_L0.99_IgG1_PVA_/S267K Heavy Chain

SEQ ID NO: 25352 - protein, 121 aa, Artificial Sequence; identical to SEQ ID NO: 22262
  Description of Artificial Sequence: Synthetic polypeptide
  VH of XENP020707

SEQ ID NO: 25353 - protein, 5 aa, Artificial Sequence
  Description of Artificial Sequence: Synthetic peptide
  XENP020707 vhCDR1
DAWMD

SEQ ID NO: 25354 - protein, 19 aa, Artificial Sequence
  Description of Artificial Sequence: Synthetic peptide
  XENP020707 vhCDR2
EIRTKANNHATYYAESVKG

SEQ ID NO: 25355 - protein, 10 aa, Artificial Sequence
  Description of Artificial Sequence: Synthetic peptide
  XENP020707 vhCDR3
LANWDWYFDV

SEQ ID NO: 25356 - protein, 218 aa, Artificial Sequence
  Description of Artificial Sequence: Synthetic polypeptide
  XENP020707 7G8_H0_L0.99_IgG1_PVA_/S267K Light Chain
DTVLTQSPASLAVSLGQRATISCKASQSVDYDGDSYMNWYQQKPGQPPKLLIYAASNLESGIPARLSGSGSGTDFTLNIHPVEEEDAATYYCQQSNYDPFTFGSGTKLEVKRTVAAPSVFIFPPSDEQLKSGTASVVCLLNNFYPREAKVQWKVDNALQSGNSQESVTEQDSKDSTYSLSSTLTLSKADYEKHKVYACEVTHQGLSSPVTKSFNRGEC

SEQ ID NO: 25357 - protein, 111 aa, Artificial Sequence
  Description of Artificial Sequence: Synthetic polypeptide
  VL of XENP020707
DTVLTQSPASLAVSLGQRATISCKASQSVDYDGDSYMNWYQQKPGQPPKLLIYAASNLESGIPARLSGSGSGTDFTLNIHPVEEEDAATYYCQQSNYDPFTFGSGTKLEVK

SEQ ID NO: 25358 - protein, 15 aa, Artificial Sequence
  Description of Artificial Sequence: Synthetic peptide
  XENP020707 vlCDR1
KASQSVDYDGDSYMN

SEQ ID NO: 25359 - protein, 7 aa, Artificial Sequence
  Description of Artificial Sequence: Synthetic peptide
  XENP020707 vlCDR2
AASNLES

SEQ ID NO: 25360 - protein, 9 aa, Artificial Sequence
  Description of Artificial Sequence: Synthetic peptide
  XENP020707 vlCDR3
QQSNYDPFT

SEQ ID NO: 25361 - protein, 450 aa, Artificial Sequence; identical to SEQ ID NO: 22261
  Description of Artificial Sequence: Synthetic polypeptide
  XENP020708 7G8_H0_L0.100_IgG1_PVA_/S267K Heavy Chain

SEQ ID NO: 25362 - protein, 121 aa, Artificial Sequence; identical to SEQ ID NO: 22262
  Description of Artificial Sequence: Synthetic polypeptide
  VH of XENP020708

SEQ ID NO: 25363 - protein, 5 aa, Artificial Sequence
  Description of Artificial Sequence: Synthetic peptide
  XENP020708 vhCDR1
DAWMD

SEQ ID NO: 25364 - protein, 19 aa, Artificial Sequence
  Description of Artificial Sequence: Synthetic peptide
  XENP020708 vhCDR2
EIRTKANNHATYYAESVKG

SEQ ID NO: 25365 - protein, 10 aa, Artificial Sequence
  Description of Artificial Sequence: Synthetic peptide
  XENP020708 vhCDR3
LANWDWYFDV

SEQ ID NO: 25366 - protein, 218 aa, Artificial Sequence
  Description of Artificial Sequence: Synthetic polypeptide
  XENP020708 7G8_H0_L0.100_IgG1_PVA_/S267K Light Chain
DTVLTQSPASLAVSLGQRATISCKASQSVDYDGDSYMNWYQQKPGQPPKLLIYAASNLESGIPARLSGSGSGTDFTLNIHPVEEEDAATYYCQQSNIDPFTFGSGTKLEVKRTVAAPSVFIFPPSDEQLKSGTASVVCLLNNFYPREAKVQWKVDNALQSGNSQESVTEQDSKDSTYSLSSTLTLSKADYEKHKVYACEVTHQGLSSPVTKSFNRGEC

SEQ ID NO: 25367 - protein, 111 aa, Artificial Sequence
  Description of Artificial Sequence: Synthetic polypeptide
  VL of XENP020708
DTVLTQSPASLAVSLGQRATISCKASQSVDYDGDSYMNWYQQKPGQPPKLLIYAASNLESGIPARLSGSGSGTDFTLNIHPVEEEDAATYYCQQSNIDPFTFGSGTKLEVK

SEQ ID NO: 25368 - protein, 15 aa, Artificial Sequence
  Description of Artificial Sequence: Synthetic peptide
  XENP020708 vlCDR1
KASQSVDYDGDSYMN

SEQ ID NO: 25369 - protein, 7 aa, Artificial Sequence
  Description of Artificial Sequence: Synthetic peptide
  XENP020708 vlCDR2
AASNLES

SEQ ID NO: 25370 - protein, 9 aa, Artificial Sequence
  Description of Artificial Sequence: Synthetic peptide
  XENP020708 vlCDR3
QQSNIDPFT

SEQ ID NO: 25371 - protein, 450 aa, Artificial Sequence; identical to SEQ ID NO: 22261
  Description of Artificial Sequence: Synthetic polypeptide
  XENP020709 7G8_H0_L0.101_IgG1_PVA_/S267K Heavy Chain

SEQ ID NO: 25372 - protein, 121 aa, Artificial Sequence; identical to SEQ ID NO: 22262
  Description of Artificial Sequence: Synthetic polypeptide
  VH of XENP020709

SEQ ID NO: 25373 - protein, 5 aa, Artificial Sequence
  Description of Artificial Sequence: Synthetic peptide
  XENP020709 vhCDR1
DAWMD

SEQ ID NO: 25374 - protein, 19 aa, Artificial Sequence
  Description of Artificial Sequence: Synthetic peptide
  XENP020709 vhCDR2
EIRTKANNHATYYAESVKG

SEQ ID NO: 25375 - protein, 10 aa, Artificial Sequence
  Description of Artificial Sequence: Synthetic peptide
  XENP020709 vhCDR3
LANWDWYFDV

SEQ ID NO: 25376 - protein, 218 aa, Artificial Sequence
  Description of Artificial Sequence: Synthetic polypeptide
  XENP020709 7G8_H0_L0.101_IgG1_PVA_/S267K Light Chain
DTVLTQSPASLAVSLGQRATISCKASQSVDYDGDSYMNWYQQKPGQPPKLLIYAASNLESGIPARLSGSGSGTDFTLNIHPVEEEDAATYYCQQSNENPFTFGSGTKLEVKRTVAAPSVFIFPPSDEQLKSGTASVVCLLNNFYPREAKVQWKVDNALQSGNSQESVTEQDSKDSTYSLSSTLTLSKADYEKHKVYACEVTHQGLSSPVTKSFNRGEC

SEQ ID NO: 25377 - protein, 111 aa, Artificial Sequence
  Description of Artificial Sequence: Synthetic polypeptide
  VL of XENP020709
DTVLTQSPASLAVSLGQRATISCKASQSVDYDGDSYMNWYQQKPGQPPKLLIYAASNLESGIPARLSGSGSGTDFTLNIHPVEEEDAATYYCQQSNENPFTFGSGTKLEVK

SEQ ID NO: 25378 - protein, 15 aa, Artificial Sequence
  Description of Artificial Sequence: Synthetic peptide
  XENP020709 vlCDR1
KASQSVDYDGDSYMN

SEQ ID NO: 25379 - protein, 7 aa, Artificial Sequence
  Description of Artificial Sequence: Synthetic peptide
  XENP020709 vlCDR2
AASNLES

SEQ ID NO: 25380 - protein, 9 aa, Artificial Sequence
  Description of Artificial Sequence: Synthetic peptide
  XENP020709 vlCDR3
QQSNENPFT

SEQ ID NO: 25381 - protein, 450 aa, Artificial Sequence; identical to SEQ ID NO: 22261
  Description of Artificial Sequence: Synthetic polypeptide
  XENP020710 7G8_H0_L0.102_IgG1_PVA_/S267K Heavy Chain

SEQ ID NO: 25382 - protein, 121 aa, Artificial Sequence; identical to SEQ ID NO: 22262
  Description of Artificial Sequence: Synthetic polypeptide
  VH of XENP020710

SEQ ID NO: 25383 - protein, 5 aa, Artificial Sequence
  Description of Artificial Sequence: Synthetic peptide
  XENP020710 vhCDR1
DAWMD

SEQ ID NO: 25384 - protein, 19 aa, Artificial Sequence
  Description of Artificial Sequence: Synthetic peptide
  XENP020710 vhCDR2
EIRTKANNHATYYAESVKG

SEQ ID NO: 25385 - protein, 10 aa, Artificial Sequence
  Description of Artificial Sequence: Synthetic peptide
  XENP020710 vhCDR3
LANWDWYFDV

SEQ ID NO: 25386 - protein, 218 aa, Artificial Sequence
  Description of Artificial Sequence: Synthetic polypeptide
  XENP020710 7G8_H0_L0.102_IgG1_PVA_/S267K Light Chain
DTVLTQSPASLAVSLGQRATISCKASQSVDYDGDSYMNWYQQKPGQPPKLLIYAASNLESGIPARLSGSGSGTDFTLNIHPVEEEDAATYYCQQSNEEPFTFGSGTKLEVKRTVAAPSVFIFPPSDEQLKSGTASVVCLLNNFYPREAKVQWKVDNALQSGNSQESVTEQDSKDSTYSLSSTLTLSKADYEKHKVYACEVTHQGLSSPVTKSFNRGEC

SEQ ID NO: 25387 - protein, 111 aa, Artificial Sequence
  Description of Artificial Sequence: Synthetic polypeptide
  VL of XENP020710
DTVLTQSPASLAVSLGQRATISCKASQSVDYDGDSYMNWYQQKPGQPPKLLIYAASNLESGIPARLSGSGSGTDFTLNIHPVEEEDAATYYCQQSNEEPFTFGSGTKLEVK

SEQ ID NO: 25388 - protein, 15 aa, Artificial Sequence
  Description of Artificial Sequence: Synthetic peptide
  XENP020710 vlCDR1
KASQSVDYDGDSYMN

SEQ ID NO: 25389 - protein, 7 aa, Artificial Sequence
  Description of Artificial Sequence: Synthetic peptide
  XENP020710 vlCDR2
AASNLES

SEQ ID NO: 25390 - protein, 9 aa, Artificial Sequence
  Description of Artificial Sequence: Synthetic peptide
  XENP020710 vlCDR3
QQSNEEPFT

SEQ ID NO: 25391 - protein, 450 aa, Artificial Sequence; identical to SEQ ID NO: 22261
  Description of Artificial Sequence: Synthetic polypeptide
  XENP020711 7G8_H0_L0.103_IgG1_PVA_/S267K Heavy Chain

SEQ ID NO: 25392 - protein, 121 aa, Artificial Sequence; identical to SEQ ID NO: 22262
  Description of Artificial Sequence: Synthetic polypeptide
  VH of XENP020711

SEQ ID NO: 25393 - protein, 5 aa, Artificial Sequence
  Description of Artificial Sequence: Synthetic peptide
  XENP020711 vhCDR1
DAWMD

SEQ ID NO: 25394 - protein, 19 aa, Artificial Sequence
  Description of Artificial Sequence: Synthetic peptide
  XENP020711 vhCDR2
EIRTKANNHATYYAESVKG

SEQ ID NO: 25395 - protein, 10 aa, Artificial Sequence
  Description of Artificial Sequence: Synthetic peptide
  XENP020711 vhCDR3
LANWDWYFDV

SEQ ID NO: 25396 - protein, 218 aa, Artificial Sequence
  Description of Artificial Sequence: Synthetic polypeptide
  XENP020711 7G8_H0_L0.103_IgG1_PVA_/S267K Light Chain
DTVLTQSPASLAVSLGQRATISCKASQSVDYDGDSYMNWYQQKPGQPPKLLIYAASNLESGIPARLSGSGSGTDFTLNIHPVEEEDAATYYCQQSNEHPFTFGSGTKLEVKRTVAAPSVFIFPPSDEQLKSGTASVVCLLNNFYPREAKVQWKVDNALQSGNSQESVTEQDSKDSTYSLSSTLTLSKADYEKHKVYACEVTHQGLSSPVTKSFNRGEC

SEQ ID NO: 25397 - protein, 111 aa, Artificial Sequence
  Description of Artificial Sequence: Synthetic polypeptide
  VL of XENP020711
DTVLTQSPASLAVSLGQRATISCKASQSVDYDGDSYMNWYQQKPGQPPKLLIYAASNLESGIPARLSGSGSGTDFTLNIHPVEEEDAATYYCQQSNEHPFTFGSGTKLEVK

SEQ ID NO: 25398 - protein, 15 aa, Artificial Sequence
  Description of Artificial Sequence: Synthetic peptide
  XENP020711 vlCDR1
KASQSVDYDGDSYMN

SEQ ID NO: 25399 - protein, 7 aa, Artificial Sequence
  Description of Artificial Sequence: Synthetic peptide
  XENP020711 vlCDR2
AASNLES

SEQ ID NO: 25400 - protein, 9 aa, Artificial Sequence
  Description of Artificial Sequence: Synthetic peptide
  XENP020711 vlCDR3
QQSNEHPFT

SEQ ID NO: 25401 - protein, 450 aa, Artificial Sequence; identical to SEQ ID NO: 22261
  Description of Artificial Sequence: Synthetic polypeptide
  XENP020712 7G8_H0_L0.104_IgG1_PVA_/S267K Heavy Chain

SEQ ID NO: 25402 - protein, 121 aa, Artificial Sequence; identical to SEQ ID NO: 22262
  Description of Artificial Sequence: Synthetic polypeptide
  VH of XENP020712

SEQ ID NO: 25403 - protein, 5 aa, Artificial Sequence
  Description of Artificial Sequence: Synthetic peptide
  XENP020712 vhCDR1
DAWMD

SEQ ID NO: 25404 - protein, 19 aa, Artificial Sequence
  Description of Artificial Sequence: Synthetic peptide
  XENP020712 vhCDR2
EIRTKANNHATYYAESVKG

SEQ ID NO: 25405 - protein, 10 aa, Artificial Sequence
  Description of Artificial Sequence: Synthetic peptide
  XENP020712 vhCDR3
LANWDWYFDV

SEQ ID NO: 25406 - protein, 218 aa, Artificial Sequence
  Description of Artificial Sequence: Synthetic polypeptide
  XENP020712 7G8_H0_L0.104_IgG1_PVA_/S267K Light Chain
DTVLTQSPASLAVSLGQRATISCKASQSVDYDGDSYMNWYQQKPGQPPKLLIYAASNLESGIPARLSGSGSGTDFTLNIHPVEEEDAATYYCQQSNERPFTFGSGTKLEVKRTVAAPSVFIFPPSDEQLKSGTASVVCLLNNFYPREAKVQWKVDNALQSGNSQESVTEQDSKDSTYSLSSTLTLSKADYEKHKVYACEVTHQGLSSPVTKSFNRGEC

SEQ ID NO: 25407 - protein, 111 aa, Artificial Sequence
  Description of Artificial Sequence: Synthetic polypeptide
  VL of XENP020712
DTVLTQSPASLAVSLGQRATISCKASQSVDYDGDSYMNWYQQKPGQPPKLLIYAASNLESGIPARLSGSGSGTDFTLNIHPVEEEDAATYYCQQSNERPFTFGSGTKLEVK

SEQ ID NO: 25408 - protein, 15 aa, Artificial Sequence
  Description of Artificial Sequence: Synthetic peptide
  XENP020712 vlCDR1
KASQSVDYDGDSYMN

SEQ ID NO: 25409 - protein, 7 aa, Artificial Sequence
  Description of Artificial Sequence: Synthetic peptide
  XENP020712 vlCDR2
AASNLES

SEQ ID NO: 25410 - protein, 9 aa, Artificial Sequence
  Description of Artificial Sequence: Synthetic peptide
  XENP020712 vlCDR3
QQSNERPFT

SEQ ID NO: 25411 - protein, 450 aa, Artificial Sequence; identical to SEQ ID NO: 22261
  Description of Artificial Sequence: Synthetic polypeptide
  XENP020713 7G8_H0_L0.105_IgG1_PVA_/S267K Heavy Chain

SEQ ID NO: 25412 - protein, 121 aa, Artificial Sequence; identical to SEQ ID NO: 22262
  Description of Artificial Sequence: Synthetic polypeptide
  VH of XENP020713

SEQ ID NO: 25413 - protein, 5 aa, Artificial Sequence
  Description of Artificial Sequence: Synthetic peptide
  XENP020713 vhCDR1
DAWMD

SEQ ID NO: 25414 - protein, 19 aa, Artificial Sequence
  Description of Artificial Sequence: Synthetic peptide
  XENP020713 vhCDR2
EIRTKANNHATYYAESVKG

SEQ ID NO: 25415 - protein, 10 aa, Artificial Sequence
  Description of Artificial Sequence: Synthetic peptide
  XENP020713 vhCDR3
LANWDWYFDV

SEQ ID NO: 25416 - protein, 218 aa, Artificial Sequence
  Description of Artificial Sequence: Synthetic polypeptide
  XENP020713 7G8_H0_L0.105_IgG1_PVA_/S267K Light Chain
DTVLTQSPASLAVSLGQRATISCKASQSVDYDGDSYMNWYQQKPGQPPKLLIYAASNLESGIPARLSGSGSGTDFTLNIHPVEEEDAATYYCQQSNELPFTFGSGTKLEVKRTVAAPSVFIFPPSDEQLKSGTASVVCLLNNFYPREAKVQWKVDNALQSGNSQESVTEQDSKDSTYSLSSTLTLSKADYEKHKVYACEVTHQGLSSPVTKSFNRGEC

SEQ ID NO: 25417 - protein, 111 aa, Artificial Sequence
  Description of Artificial Sequence: Synthetic polypeptide
  VL of XENP020713
DTVLTQSPASLAVSLGQRATISCKASQSVDYDGDSYMNWYQQKPGQPPKLLIYAASNLESGIPARLSGSGSGTDFTLNIHPVEEEDAATYYCQQSNELPFTFGSGTKLEVK

SEQ ID NO: 25418 - protein, 15 aa, Artificial Sequence
  Description of Artificial Sequence: Synthetic peptide
  XENP020713 vlCDR1
KASQSVDYDGDSYMN

SEQ ID NO: 25419 - protein, 7 aa, Artificial Sequence
  Description of Artificial Sequence: Synthetic peptide
  XENP020713 vlCDR2
AASNLES

SEQ ID NO: 25420 - protein, 9 aa, Artificial Sequence
  Description of Artificial Sequence: Synthetic peptide
  XENP020713 vlCDR3
QQSNELPFT

SEQ ID NO: 25421 - protein, 450 aa, Artificial Sequence; identical to SEQ ID NO: 22261
  Description of Artificial Sequence: Synthetic polypeptide
  XENP020714 7G8_H0_L0.106_IgG1_PVA_/S267K Heavy Chain

SEQ ID NO: 25422 - protein, 121 aa, Artificial Sequence; identical to SEQ ID NO: 22262
  Description of Artificial Sequence: Synthetic polypeptide
  VH of XENP020714

SEQ ID NO: 25423 - protein, 5 aa, Artificial Sequence
  Description of Artificial Sequence: Synthetic peptide
  XENP020714 vhCDR1
DAWMD

SEQ ID NO: 25424 - protein, 19 aa, Artificial Sequence
  Description of Artificial Sequence: Synthetic peptide
  XENP020714 vhCDR2
EIRTKANNHATYYAESVKG

SEQ ID NO: 25425 - protein, 10 aa, Artificial Sequence
  Description of Artificial Sequence: Synthetic peptide
  XENP020714 vhCDR3
LANWDWYFDV

SEQ ID NO: 25426 - protein, 218 aa, Artificial Sequence
  Description of Artificial Sequence: Synthetic polypeptide
  XENP020714 7G8_H0_L0.106_IgG1_PVA_/S267K Light Chain
DTVLTQSPASLAVSLGQRATISCKASQSVDYDGDSYMNWYQQKPGQPPKLLIYAASNLESGIPARLSGSGSGTDFTLNIHPVEEEDAATYYCQQSNEGPFTFGSGTKLEVKRTVAAPSVFIFPPSDEQLKSGTASVVCLLNNFYPREAKVQWKVDNALQSGNSQESVTEQDSKDSTYSLSSTLTLSKADYEKHKVYACEVTHQGLSSPVTKSFNRGEC

SEQ ID NO: 25427 - protein, 111 aa, Artificial Sequence
  Description of Artificial Sequence: Synthetic polypeptide
  VL of XENP020714
DTVLTQSPASLAVSLGQRATISCKASQSVDYDGDSYMNWYQQKPGQPPKLLIYAASNLESGIPARLSGSGSGTDFTLNIHPVEEEDAATYYCQQSNEGPFTFGSGTKLEVK

SEQ ID NO: 25428 - protein, 15 aa, Artificial Sequence
  Description of Artificial Sequence: Synthetic peptide
  XENP020714 vlCDR1
KASQSVDYDGDSYMN

SEQ ID NO: 25429 - protein, 7 aa, Artificial Sequence
  Description of Artificial Sequence: Synthetic peptide
  XENP020714 vlCDR2
AASNLES

SEQ ID NO: 25430 - protein, 9 aa, Artificial Sequence
  Description of Artificial Sequence: Synthetic peptide
  XENP020714 vlCDR3
QQSNEGPFT

SEQ ID NO: 25431 - protein, 450 aa, Artificial Sequence; identical to SEQ ID NO: 22261
  Description of Artificial Sequence: Synthetic polypeptide
  XENP020715 7G8_H0_L0.107_IgG1_PVA_/S267K Heavy Chain

SEQ ID NO: 25432 - protein, 121 aa, Artificial Sequence; identical to SEQ ID NO: 22262
  Description of Artificial Sequence: Synthetic polypeptide
  VH of XENP020715

SEQ ID NO: 25433 - protein, 5 aa, Artificial Sequence
  Description of Artificial Sequence: Synthetic peptide
  XENP020715 vhCDR1
DAWMD

SEQ ID NO: 25434 - protein, 19 aa, Artificial Sequence
  Description of Artificial Sequence: Synthetic peptide
  XENP020715 vhCDR2
EIRTKANNHATYYAESVKG

SEQ ID NO: 25435 - protein, 10 aa, Artificial Sequence
  Description of Artificial Sequence: Synthetic peptide
  XENP020715 vhCDR3
LANWDWYFDV

SEQ ID NO: 25436 - protein, 218 aa, Artificial Sequence
  Description of Artificial Sequence: Synthetic polypeptide
  XENP020715 7G8_H0_L0.107_IgG1_PVA_/S267K Light Chain
DTVLTQSPASLAVSLGQRATISCKASQSVDYDGDSYMNWYQQKPGQPPKLLIYAASNLESGIPARLSGSGSGTDFTLNIHPVEEEDAATYYCQQSNEYPFTFGSGTKLEVKRTVAAPSVFIFPPSDEQLKSGTASVVCLLNNFYPREAKVQWKVDNALQSGNSQESVTEQDSKDSTYSLSSTLTLSKADYEKHKVYACEVTHQGLSSPVTKSFNRGEC

SEQ ID NO: 25437 - protein, 111 aa, Artificial Sequence
  Description of Artificial Sequence: Synthetic polypeptide
  VL of XENP020715
DTVLTQSPASLAVSLGQRATISCKASQSVDYDGDSYMNWYQQKPGQPPKLLIYAASNLESGIPARLSGSGSGTDFTLNIHPVEEEDAATYYCQQSNEYPFTFGSGTKLEVK

SEQ ID NO: 25438 - protein, 15 aa, Artificial Sequence
  Description of Artificial Sequence: Synthetic peptide
  XENP020715 vlCDR1
KASQSVDYDGDSYMN

SEQ ID NO: 25439 - protein, 7 aa, Artificial Sequence
  Description of Artificial Sequence: Synthetic peptide
  XENP020715 vlCDR2
AASNLES

SEQ ID NO: 25440 - protein, 9 aa, Artificial Sequence
  Description of Artificial Sequence: Synthetic peptide
  XENP020715 vlCDR3
QQSNEYPFT

SEQ ID NO: 25441 - protein, 446 aa, Artificial Sequence
  Description of Artificial Sequence: Synthetic polypeptide
  XENP016275 mAb8213_H0L0_IgG1_PVA_/S267K Heavy Chain
QVQLVQSGAEVKKPGASVKVSCKASGYTFTSYWMHWVRQAPGQGLEWMGEINPSNGRTNYNEKFKTRVTITADTSTSTAYMELSSLRSEDTAVYYCARGYYLYFDYWGQGTLVTVSSASTKGPSVFPLAPSSKSTSGGTAALGCLVKDYFPEPVTVSWNSGALTSGVHTFPAVLQSSGLYSLSSVVTVPSSSLGTQTYICNVNHKPSNTKVDKKVEPKSCDKTHTCPPCPAPPVAGPSVFLFPPKPKDTLMISRTPEVTCVVVDVKHEDPEVKFNWYVDGVEVHNAKTKPREEQYNSTYRVVSVLTVLHQDWLNGKEYKCKVSNKALPAPIEKTISKAKGQPREPQVYTLPPSREEMTKNQVSLTCLVKGFYPSDIAVEWESNGQPENNYKTTPPVLDSDGSFFLYSKLTVDKSRWQQGNVFSCSVMHEALHNHYTQKSLSLSPGK

SEQ ID NO: 25442 - protein, 117 aa, Artificial Sequence; identical to SEQ ID NO: 4641
  Description of Artificial Sequence: Synthetic polypeptide
  VH of XENP016275

SEQ ID NO: 25443 - protein, 5 aa, Artificial Sequence
  Description of Artificial Sequence: Synthetic peptide
  XENP016275 vhCDR1
SYWMH

SEQ ID NO: 25444 - protein, 17 aa, Artificial Sequence
  Description of Artificial Sequence: Synthetic peptide
  XENP016275 vhCDR2
EINPSNGRTNYNEKFKT

SEQ ID NO: 25445 - protein, 8 aa, Artificial Sequence
  Description of Artificial Sequence: Synthetic peptide
  XENP016275 vhCDR3
GYYLYFDY

SEQ ID NO: 25446 - protein, 214 aa, Artificial Sequence
  Description of Artificial Sequence: Synthetic polypeptide
  XENP016275 mAb8213_H0L0_IgG1_PVA_/S267K Light Chain
DIQMTQSPSSLSASVGDRVTITCHASQGIRINIGWYQQKPGKAPKLLIYHGTNLEDGVPSRFSGSGSGTDFTLTISSLQPEDFATYYCVQYGQFPWTFGQGTKLEIKRTVAAPSVFIFPPSDEQLKSGTASVVCLLNNFYPREAKVQWKVDNALQSGNSQESVTEQDSKDSTYSLSSTLTLSKADYEKHKVYACEVTHQGLSSPVTKSFNRGEC

SEQ ID NO: 25447 - protein, 107 aa, Artificial Sequence; identical to SEQ ID NO: 4645
  Description of Artificial Sequence: Synthetic polypeptide
  VL of XENP016275

SEQ ID NO: 25448 - protein, 11 aa, Artificial Sequence
  Description of Artificial Sequence: Synthetic peptide
  XENP016275 vlCDR1
HASQGIRINIG

SEQ ID NO: 25449 - protein, 7 aa, Artificial Sequence
  Description of Artificial Sequence: Synthetic peptide
  XENP016275 vlCDR2
HGTNLED

SEQ ID NO: 25450 - protein, 9 aa, Artificial Sequence
  Description of Artificial Sequence: Synthetic peptide
  XENP016275 vlCDR3
VQYGQFPWT

SEQ ID NO: 25451 - protein, 447 aa, Artificial Sequence
  Description of Artificial Sequence: Synthetic polypeptide
  XENP017973 ABTIM3_H0L0_IgG1_PVA_/S267K Heavy Chain
QVQLQQPGAELVKPGASVKMSCKASGYTFTSYNMHWIKQTPGQGLEWIGDIYPGNGDTSYNQKFKGKATLTADKSSSTVYMQLSSLTSEDSAVYYCARVGGAFPMDYWGQGTSVTVSSASTKGPSVFPLAPSSKSTSGGTAALGCLVKDYFPEPVTVSWNSGALTSGVHTFPAVLQSSGLYSLSSVVTVPSSSLGTQTYICNVNHKPSNTKVDKKVEPKSCDKTHTCPPCPAPPVAGPSVFLFPPKPKDTLMISRTPEVTCVVVDVKHEDPEVKFNWYVDGVEVHNAKTKPREEQYNSTYRVVSVLTVLHQDWLNGKEYKCKVSNKALPAPIEKTISKAKGQPREPQVYTLPPSREEMTKNQVSLTCLVKGFYPSDIAVEWESNGQPENNYKTTPPVLDSDGSFFLYSKLTVDKSRWQQGNVFSCSVMHEALHNHYTQKSLSLSPGK

SEQ ID NO: 25452 - protein, 118 aa, Artificial Sequence
  Description of Artificial Sequence: Synthetic polypeptide
  VH of XENP017973
QVQLQQPGAELVKPGASVKMSCKASGYTFTSYNMHWIKQTPGQGLEWIGDIYPGNGDTSYNQKFKGKATLTADKSSSTVYMQLSSLTSEDSAVYYCARVGGAFPMDYWGQGTSVTVSS

SEQ ID NO: 25453 - protein, 5 aa, Artificial Sequence
  Description of Artificial Sequence: Synthetic peptide
  XENP017973 vhCDR1
SYNMH

SEQ ID NO: 25454 - protein, 17 aa, Artificial Sequence
  Description of Artificial Sequence: Synthetic peptide
  XENP017973 vhCDR2
DIYPGNGDTSYNQKFKG

SEQ ID NO: 25455 - protein, 9 aa, Artificial Sequence
  Description of Artificial Sequence: Synthetic peptide
  XENP017973 vhCDR3
VGGAFPMDY

SEQ ID NO: 25456 - protein, 218 aa, Artificial Sequence
  Description of Artificial Sequence: Synthetic polypeptide
  XENP017973 ABTIM3_H0L0_IgG1_PVA_/S267K Light Chain
DIVLTQSPASLAVSLGQRATISCRASESVEYYGTSLMQWYQQKPGQPPKLLIYAASNVESGVPARFSGSGSGTDFSLNIHPVEEDDIAIYFCQQSRKDPSTFGGGTKLEIKRTVAAPSVFIFPPSDEQLKSGTASVVCLLNNFYPREAKVQWKVDNALQSGNSQESVTEQDSKDSTYSLSSTLTLSKADYEKHKVYACEVTHQGLSSPVTKSFNRGEC

SEQ ID NO: 25457 - protein, 111 aa, Artificial Sequence
  Description of Artificial Sequence: Synthetic polypeptide
  VL of XENP017973
DIVLTQSPASLAVSLGQRATISCRASESVEYYGTSLMQWYQQKPGQPPKLLIYAASNVESGVPARFSGSGSGTDFSLNIHPVEEDDIAIYFCQQSRKDPSTFGGGTKLEIK

SEQ ID NO: 25458 - protein, 15 aa, Artificial Sequence
  Description of Artificial Sequence: Synthetic peptide
  XENP017973 vlCDR1
RASESVEYYGTSLMQ

SEQ ID NO: 25459 - protein, 7 aa, Artificial Sequence
  Description of Artificial Sequence: Synthetic peptide
  XENP017973 vlCDR2
AASNVES

SEQ ID NO: 25460 - protein, 9 aa, Artificial Sequence
  Description of Artificial Sequence: Synthetic peptide
  XENP017973 vlCDR3
QQSRKDPST

SEQ ID NO: 25461 - protein, 447 aa, Artificial Sequence
  Description of Artificial Sequence: Synthetic polypeptide
  XENP017975 ABTIM3-hum11_H0L0_IgG1_PVA_/S267K Heavy Chain
QVQLVQSGAEVKKPGSSVKVSCKASGYTFTSYNMHWVRQAPGQGLEWMGDIYPGNGDTSYNQKFKGRVTITADKSTSTVYMELSSLRSEDTAVYYCARVGGAFPMDYWGQGTTVTVSSASTKGPSVFPLAPSSKSTSGGTAALGCLVKDYFPEPVTVSWNSGALTSGVHTFPAVLQSSGLYSLSSVVTVPSSSLGTQTYICNVNHKPSNTKVDKKVEPKSCDKTHTCPPCPAPPVAGPSVFLFPPKPKDTLMISRTPEVTCVVVDVKHEDPEVKFNWYVDGVEVHNAKTKPREEQYNSTYRVVSVLTVLHQDWLNGKEYKCKVSNKALPAPIEKTISKAKGQPREPQVYTLPPSREEMTKNQVSLTCLVKGFYPSDIAVEWESNGQPENNYKTTPPVLDSDGSFFLYSKLTVDKSRWQQGNVFSCSVMHEALHNHYTQKSLSLSPGK

SEQ ID NO: 25462 - protein, 118 aa, Artificial Sequence; identical to SEQ ID NO: 4609
  Description of Artificial Sequence: Synthetic polypeptide
  VH of XENP017975

SEQ ID NO: 25463 - protein, 5 aa, Artificial Sequence
  Description of Artificial Sequence: Synthetic peptide
  XENP017975 vhCDR1
SYNMH

SEQ ID NO: 25464 - protein, 17 aa, Artificial Sequence
  Description of Artificial Sequence: Synthetic peptide
  XENP017975 vhCDR2
DIYPGNGDTSYNQKFKG

SEQ ID NO: 25465 - protein, 9 aa, Artificial Sequence
  Description of Artificial Sequence: Synthetic peptide
  XENP017975 vhCDR3
VGGAFPMDY

SEQ ID NO: 25466 - protein, 218 aa, Artificial Sequence
  Description of Artificial Sequence: Synthetic polypeptide
  XENP017975 ABTIM3-hum11_H0L0_IgG1_PVA_/S267K Light Chain
AIQLTQSPSSLSASVGDRVTITCRASESVEYYGTSLMQWYQQKPGKAPKLLIYAASNVESGVPSRFSGSGSGTDFTLTISSLQPEDFATYFCQQSRKDPSTFGGGTKVEIKRTVAAPSVFIFPPSDEQLKSGTASVVCLLNNFYPREAKVQWKVDNALQSGNSQESVTEQDSKDSTYSLSSTLTLSKADYEKHKVYACEVTHQGLSSPVTKSFNRGEC

SEQ ID NO: 25467 - protein, 111 aa, Artificial Sequence; identical to SEQ ID NO: 4613
  Description of Artificial Sequence: Synthetic polypeptide
  VL of XENP017975

SEQ ID NO: 25468 - protein, 15 aa, Artificial Sequence
  Description of Artificial Sequence: Synthetic peptide
  XENP017975 vlCDR1
RASESVEYYGTSLMQ

SEQ ID NO: 25469 - protein, 7 aa, Artificial Sequence
  Description of Artificial Sequence: Synthetic peptide
  XENP017975 vlCDR2
AASNVES

SEQ ID NO: 25470 - protein, 9 aa, Artificial Sequence
  Description of Artificial Sequence: Synthetic peptide
  XENP017975 vlCDR3
QQSRKDPST

SEQ ID NO: 25471 - protein, 446 aa, Artificial Sequence
  Description of Artificial Sequence: Synthetic polypeptide
  XENP020403 1B3_H0L0_IgG1_PVA_/S267K Heavy Chain
EVKLVESGGGLVKPGGSLTLSCAASEFTFSSYAMSWVRQTPEKRLEWVASISSGGRTYYPDSVKGRFTISRDNARNILYLQMSSLRSEDTAMYYCARGRGFDVMDYWGQGTSVTVSSASTKGPSVFPLAPSSKSTSGGTAALGCLVKDYFPEPVTVSWNSGALTSGVHTFPAVLQSSGLYSLSSVVTVPSSSLGTQTYICNVNHKPSNTKVDKKVEPKSCDKTHTCPPCPAPPVAGPSVFLFPPKPKDTLMISRTPEVTCVVVDVKHEDPEVKFNWYVDGVEVHNAKTKPREEQYNSTYRVVSVLTVLHQDWLNGKEYKCKVSNKALPAPIEKTISKAKGQPREPQVYTLPPSREEMTKNQVSLTCLVKGFYPSDIAVEWESNGQPENNYKTTPPVLDSDGSFFLYSKLTVDKSRWQQGNVFSCSVMHEALHNHYTQKSLSLSPGK

SEQ ID NO: 25472 - protein, 117 aa, Artificial Sequence
  Description of Artificial Sequence: Synthetic polypeptide
  VH of XENP020403
EVKLVESGGGLVKPGGSLTLSCAASEFTFSSYAMSWVRQTPEKRLEWVASISSGGRTYYPDSVKGRFTISRDNARNILYLQMSSLRSEDTAMYYCARGRGFDVMDYWGQGTSVTVSS

SEQ ID NO: 25473 - protein, 5 aa, Artificial Sequence
  Description of Artificial Sequence: Synthetic peptide
  XENP020403 vhCDR1
SYAMS

SEQ ID NO: 25474 - protein, 16 aa, Artificial Sequence
  Description of Artificial Sequence: Synthetic peptide
  XENP020403 vhCDR2
SISSGGRTYYPDSVKG

SEQ ID NO: 25475 - protein, 9 aa, Artificial Sequence
  Description of Artificial Sequence: Synthetic peptide
  XENP020403 vhCDR3
GRGFDVMDY

SEQ ID NO: 25476 - protein, 214 aa, Artificial Sequence
  Description of Artificial Sequence: Synthetic polypeptide
  XENP020403 1B3_H0L0_IgG1_PVA_/S267K Light Chain
DIQMTQTTSSLSASLGDRVTISCRASQDISNYLNWYQQKPDGTVKLLIYYTSRLHSGVPSRFSGSGSGTDYSLTISNLEQEDIATYFCQQGNTLPYTFGGGTKLEIKRTVAAPSVFIFPPSDEQLKSGTASVVCLLNNFYPREAKVQWKVDNALQSGNSQESVTEQDSKDSTYSLSSTLTLSKADYEKHKVYACEVTHQGLSSPVTKSFNRGEC

SEQ ID NO: 25477 - protein, 107 aa, Artificial Sequence
  Description of Artificial Sequence: Synthetic polypeptide
  VL of XENP020403
DIQMTQTTSSLSASLGDRVTISCRASQDISNYLNWYQQKPDGTVKLLIYYTSRLHSGVPSRFSGSGSGTDYSLTISNLEQEDIATYFCQQGNTLPYTFGGGTKLEIK

SEQ ID NO: 25478 - protein, 11 aa, Artificial Sequence
  Description of Artificial Sequence: Synthetic peptide
  XENP020403 vlCDR1
RASQDISNYLN

SEQ ID NO: 25479 - protein, 7 aa, Artificial Sequence
  Description of Artificial Sequence: Synthetic peptide
  XENP020403 vlCDR2
YTSRLHS

SEQ ID NO: 25480 - protein, 9 aa, Artificial Sequence
  Description of Artificial Sequence: Synthetic peptide
  XENP020403 vlCDR3
QQGNTLPYT

SEQ ID NO: 25481 - protein, 446 aa, Artificial Sequence
  Description of Artificial Sequence: Synthetic polypeptide
  XENP020404 1D12_H0L0_IgG1_PVA_/S267K Heavy Chain
QVQLQQSAADLARPGASVKLSCKASGYTFTSYTMHWVKQRPGQGLEWIGYLIPSSGYTDYNQRFKDKTTLTADKSSSTAYMQLSSLTSEDSAVYYCARGDSVYFDYWGQGTALTVSSASTKGPSVFPLAPSSKSTSGGTAALGCLVKDYFPEPVTVSWNSGALTSGVHTFPAVLQSSGLYSLSSVVTVPSSSLGTQTYICNVNHKPSNTKVDKKVEPKSCDKTHTCPPCPAPPVAGPSVFLFPPKPKDTLMISRTPEVTCVVVDVKHEDPEVKFNWYVDGVEVHNAKTKPREEQYNSTYRVVSVLTVLHQDWLNGKEYKCKVSNKALPAPIEKTISKAKGQPREPQVYTLPPSREEMTKNQVSLTCLVKGFYPSDIAVEWESNGQPENNYKTTPPVLDSDGSFFLYSKLTVDKSRWQQGNVFSCSVMHEALHNHYTQKSLSLSPGK

SEQ ID NO: 25482 - protein, 117 aa, Artificial Sequence
  Description of Artificial Sequence: Synthetic polypeptide
  VH of XENP020404
QVQLQQSAADLARPGASVKLSCKASGYTFTSYTMHWVKQRPGQGLEWIGYLIPSSGYTDYNQRFKDKTTLTADKSSSTAYMQLSSLTSEDSAVYYCARGDSVYFDYWGQGTALTVSS

SEQ ID NO: 25483 - protein, 5 aa, Artificial Sequence
  Description of Artificial Sequence: Synthetic peptide
  XENP020404 vhCDR1
SYTMH

SEQ ID NO: 25484 - protein, 17 aa, Artificial Sequence
  Description of Artificial Sequence: Synthetic peptide
  XENP020404 vhCDR2
YLIPSSGYTDYNQRFKD

SEQ ID NO: 25485 - protein, 8 aa, Artificial Sequence
  Description of Artificial Sequence: Synthetic peptide
  XENP020404 vhCDR3
GDSVYFDY

SEQ ID NO: 25486 - protein, 218 aa, Artificial Sequence
  Description of Artificial Sequence: Synthetic polypeptide
  XENP020404 1D12_H0L0_IgG1_PVA_/S267K Light Chain
DIVLTQSPASLAVSLGQRATISCRASESVEYYGTSLQQKYQQKPGQPPKLLIYAASNVESGVPARFSGSGSGTDFSLNIHPVEEDDIAQYFCQQSRKVPWTFGGGTKLEIKRTVAAPSVFIFPPSDEQLKSGTASVVCLLNNFYPREAKVQWKVDNALQSGNSQESVTEQDSKDSTYSLSSTLTLSKADYEKHKVYACEVTHQGLSSPVTKSFNRGEC

SEQ ID NO: 25487 - protein, 111 aa, Artificial Sequence
  Description of Artificial Sequence: Synthetic polypeptide
  VL of XENP020404
DIVLTQSPASLAVSLGQRATISCRASESVEYYGTSLQQKYQQKPGQPPKLLIYAASNVESGVPARFSGSGSGTDFSLNIHPVEEDDIAQYFCQQSRKVPWTFGGGTKLEIK

SEQ ID NO: 25488 - protein, 15 aa, Artificial Sequence
  Description of Artificial Sequence: Synthetic peptide
  XENP020404 vlCDR1
RASESVEYYGTSLQQ

SEQ ID NO: 25489 - protein, 7 aa, Artificial Sequence
  Description of Artificial Sequence: Synthetic peptide
  XENP020404 vlCDR2
AASNVES

SEQ ID NO: 25490 - protein, 9 aa, Artificial Sequence
  Description of Artificial Sequence: Synthetic peptide
  XENP020404 vlCDR3
QQSRKVPWT

SEQ ID NO: 25491 - protein, 446 aa, Artificial Sequence
  Description of Artificial Sequence: Synthetic polypeptide
  XENP020405 3H3_H0L0_IgG1_PVA_/S267K Heavy Chain
QVQLKESGPGLVAPSQSLSITCTVSGFSLNGYGVNWVRQPPGKGLEWLGYIIGDGSTDYNSALKSRLSISKDNSKSQVFLKMNSLQTDDTARYYCARSYYTSDEDYWGQGTLVTVSAASTKGPSVFPLAPSSKSTSGGTAALGCLVKDYFPEPVTVSWNSGALTSGVHTFPAVLQSSGLYSLSSVVTVPSSSLGTQTYICNVNHKPSNTKVDKKVEPKSCDKTHTCPPCPAPPVAGPSVFLFPPKPKDTLMISRTPEVTCVVVDVKHEDPEVKFNWYVDGVEVHNAKTKPREEQYNSTYRVVSVLTVLHQDWLNGKEYKCKVSNKALPAPIEKTISKAKGQPREPQVYTLPPSREEMTKNQVSLTCLVKGFYPSDIAVEWESNGQPENNYKTTPPVLDSDGSFFLYSKLTVDKSRWQQGNVFSCSVMHEALHNHYTQKSLSLSPGK

SEQ ID NO: 25492 - protein, 117 aa, Artificial Sequence
  Description of Artificial Sequence: Synthetic polypeptide
  VH of XENP020405
QVQLKESGPGLVAPSQSLSITCTVSGFSLNGYGVNWVRQPPGKGLEWLGYIIGDGSTDYNSALKSRLSISKDNSKSQVFLKMNSLQTDDTARYYCARSYYTSDEDYWGQGTLVTVSA

SEQ ID NO: 25493 - protein, 5 aa, Artificial Sequence
  Description of Artificial Sequence: Synthetic peptide
  XENP020405 vhCDR1
GYGVN

SEQ ID NO: 25494 - protein, 16 aa, Artificial Sequence
  Description of Artificial Sequence: Synthetic peptide
  XENP020405 vhCDR2
YIIGDGSTDYNSALKS

SEQ ID NO: 25495 - protein, 9 aa, Artificial Sequence
  Description of Artificial Sequence: Synthetic peptide
  XENP020405 vhCDR3
SYYTSDEDY

SEQ ID NO: 25496 - protein, 219 aa, Artificial Sequence
  Description of Artificial Sequence: Synthetic polypeptide
  XENP020405 3H3_H0L0_IgG1_PVA_/S267K Light Chain
DIVLSQSPSSLAVSAGEKVTISCKSSQSLLNSRTRKNYLAQYQQKPGQSPKLLIYSASTRESGVPDRFTGSGSGTDFTLTISSVLAEDLAVYYCKQSYSLRTFGGGTKLEIKRTVAAPSVFIFPPSDEQLKSGTASVVCLLNNFYPREAKVQWKVDNALQSGNSQESVTEQDSKDSTYSLSSTLTLSKADYEKHKVYACEVTHQGLSSPVTKSFNRGEC

SEQ ID NO: 25497 - protein, 112 aa, Artificial Sequence
  Description of Artificial Sequence: Synthetic polypeptide
  VL of XENP020405
DIVLSQSPSSLAVSAGEKVTISCKSSQSLLNSRTRKNYLAQYQQKPGQSPKLLIYSASTRESGVPDRFTGSGSGTDFTLTISSVLAEDLAVYYCKQSYSLRTFGGGTKLEIK

SEQ ID NO: 25498 - protein, 17 aa, Artificial Sequence
  Description of Artificial Sequence: Synthetic peptide
  XENP020405 vlCDR1
KSSQSLLNSRTRKNYLA

SEQ ID NO: 25499 - protein, 7 aa, Artificial Sequence
  Description of Artificial Sequence: Synthetic peptide
  XENP020405 vlCDR2
SASTRES

SEQ ID NO: 25500 - protein, 8 aa, Artificial Sequence
  Description of Artificial Sequence: Synthetic peptide
  XENP020405 vlCDR3
KQSYSLRT

SEQ ID NO: 25501 - protein, 446 aa, Artificial Sequence
  Description of Artificial Sequence: Synthetic polypeptide
  XENP020406 6D9_H0_1D12_L0_IgG1_PVA_/S267K Heavy Chain
QVQLKQSGPGLVQPSQSLSITCTVSGFSLTSYGVHWVRQSPGKGLEWLGVIISGGSTEYNAAFISRLSISKDNSKSQVFFKMNSLQADDTAIYYCARGGLLSPFDYWGQGTTLTVSSASTKGPSVFPLAPSSKSTSGGTAALGCLVKDYFPEPVTVSWNSGALTSGVHTFPAVLQSSGLYSLSSVVTVPSSSLGTQTYICNVNHKPSNTKVDKKVEPKSCDKTHTCPPCPAPPVAGPSVFLFPPKPKDTLMISRTPEVTCVVVDVKHEDPEVKFNWYVDGVEVHNAKTKPREEQYNSTYRVVSVLTVLHQDWLNGKEYKCKVSNKALPAPIEKTISKAKGQPREPQVYTLPPSREEMTKNQVSLTCLVKGFYPSDIAVEWESNGQPENNYKTTPPVLDSDGSFFLYSKLTVDKSRWQQGNVFSCSVMHEALHNHYTQKSLSLSPGK

SEQ ID NO: 25502 - protein, 117 aa, Artificial Sequence
  Description of Artificial Sequence: Synthetic polypeptide
  VH of XENP020406
QVQLKQSGPGLVQPSQSLSITCTVSGFSLTSYGVHWVRQSPGKGLEWLGVIISGGSTEYNAAFISRLSISKDNSKSQVFFKMNSLQADDTAIYYCARGGLLSPFDYWGQGTTLTVSS

SEQ ID NO: 25503 - protein, 5 aa, Artificial Sequence
  Description of Artificial Sequence: Synthetic peptide
  XENP020406 vhCDR1
SYGVH

SEQ ID NO: 25504 - protein, 16 aa, Artificial Sequence
  Description of Artificial Sequence: Synthetic peptide
  XENP020406 vhCDR2
VIISGGSTEYNAAFIS

SEQ ID NO: 25505 - protein, 9 aa, Artificial Sequence
  Description of Artificial Sequence: Synthetic peptide
  XENP020406 vhCDR3
GGLLSPFDY

SEQ ID NO: 25506 - protein, 218 aa, Artificial Sequence; identical to SEQ ID NO: 25486
  Description of Artificial Sequence: Synthetic polypeptide
  XENP020406 6D9_H0_1D12_L0_IgG1_PVA_/S267K Light Chain

SEQ ID NO: 25507 - protein, 111 aa, Artificial Sequence; identical to SEQ ID NO: 25487
  Description of Artificial Sequence: Synthetic polypeptide
  VL of XENP020406

SEQ ID NO: 25508 - protein, 15 aa, Artificial Sequence
  Description of Artificial Sequence: Synthetic peptide
  XENP020406 vlCDR1
RASESVEYYGTSLQQ

SEQ ID NO: 25509 - protein, 7 aa, Artificial Sequence
  Description of Artificial Sequence: Synthetic peptide
  XENP020406 vlCDR2
AASNVES

SEQ ID NO: 25510 - protein, 9 aa, Artificial Sequence
  Description of Artificial Sequence: Synthetic peptide
  XENP020406 vlCDR3
QQSRKVPWT

SEQ ID NO: 25511 - protein, 447 aa, Artificial Sequence; identical to SEQ ID NO: 3665
  Description of Artificial Sequence: Synthetic polypeptide
  XENP020407 7B11_H0L0_IgG1_PVA_/S267K Heavy Chain

SEQ ID NO: 25512 - protein, 118 aa, Artificial Sequence; identical to SEQ ID NO: 3666
  Description of Artificial Sequence: Synthetic polypeptide
  VH of XENP020407

SEQ ID NO: 25513 - protein, 5 aa, Artificial Sequence
  Description of Artificial Sequence: Synthetic peptide
  XENP020407 vhCDR1
SYAVN

SEQ ID NO: 25514 - protein, 16 aa, Artificial Sequence
  Description of Artificial Sequence: Synthetic peptide
  XENP020407 vhCDR2
VIWSGGSTDYNAAFIS

SEQ ID NO: 25515 - protein, 10 aa, Artificial Sequence
  Description of Artificial Sequence: Synthetic peptide
  XENP020407 vhCDR3
LYYRYDGFDY

SEQ ID NO: 25516 - protein, 214 aa, Artificial Sequence
  Description of Artificial Sequence: Synthetic polypeptide
  XENP020407 7B11_H0L0_IgG1_PVA_/S267K Light Chain
DIVLTQSQKFLSTSVGDRVSVTCKASQNVGTHVARYQQKPGQSPKALVYSASYRYSGVPDRFTGSGSGTDFTLTISNVQSEDLAEYFCQQYNSYPLTFGGGTKLEIKRTVAAPSVFIFPPSDEQLKSGTASVVCLLNNFYPREAKVQWKVDNALQSGNSQESVTEQDSKDSTYSLSSTLTLSKADYEKHKVYACEVTHQGLSSPVTKSFNRGEC

SEQ ID NO: 25517 - protein, 107 aa, Artificial Sequence
  Description of Artificial Sequence: Synthetic polypeptide
  VL of XENP020407
DIVLTQSQKFLSTSVGDRVSVTCKASQNVGTHVARYQQKPGQSPKALVYSASYRYSGVPDRFTGSGSGTDFTLTISNVQSEDLAEYFCQQYNSYPLTFGGGTKLEIK

SEQ ID NO: 25518 - protein, 11 aa, Artificial Sequence
  Description of Artificial Sequence: Synthetic peptide
  XENP020407 vlCDR1
KASQNVGTHVA

SEQ ID NO: 25519 - protein, 7 aa, Artificial Sequence
  Description of Artificial Sequence: Synthetic peptide
  XENP020407 vlCDR2
SASYRYS

SEQ ID NO: 25520 - protein, 9 aa, Artificial Sequence
  Description of Artificial Sequence: Synthetic peptide
  XENP020407 vlCDR3
QQYNSYPLT

SEQ ID NO: 25521 - protein, 447 aa, Artificial Sequence; identical to SEQ ID NO: 3675
  Description of Artificial Sequence: Synthetic polypeptide
  XENP020408 7B11var_H0L0_IgG1_PVA_/S267K Heavy Chain

SEQ ID NO: 25522 - protein, 118 aa, Artificial Sequence; identical to SEQ ID NO: 3676
  Description of Artificial Sequence: Synthetic polypeptide
  VH of XENP020408

SEQ ID NO: 25523 - protein, 5 aa, Artificial Sequence
  Description of Artificial Sequence: Synthetic peptide
  XENP020408 vhCDR1
SYAVN

SEQ ID NO: 25524 - protein, 16 aa, Artificial Sequence
  Description of Artificial Sequence: Synthetic peptide
  XENP020408 vhCDR2
VIWSGGSTDYNAAFIS

SEQ ID NO: 25525 - protein, 10 aa, Artificial Sequence
  Description of Artificial Sequence: Synthetic peptide
  XENP020408 vhCDR3
LYYRYDGFDY

SEQ ID NO: 25526 - protein, 214 aa, Artificial Sequence; identical to SEQ ID NO: 25516
  Description of Artificial Sequence: Synthetic polypeptide
  XENP020408 7B11var_H0L0_IgG1_PVA_/S267K Light Chain

SEQ ID NO: 25527 - protein, 107 aa, Artificial Sequence; identical to SEQ ID NO: 25517
  Description of Artificial Sequence: Synthetic polypeptide
  VL of XENP020408

SEQ ID NO: 25528 - protein, 11 aa, Artificial Sequence
  Description of Artificial Sequence: Synthetic peptide
  XENP020408 vlCDR1
KASQNVGTHVA

SEQ ID NO: 25529 - protein, 7 aa, Artificial Sequence
  Description of Artificial Sequence: Synthetic peptide
  XENP020408 vlCDR2
SASYRYS

SEQ ID NO: 25530 - protein, 9 aa, Artificial Sequence
  Description of Artificial Sequence: Synthetic peptide
  XENP020408 vlCDR3
QQYNSYPLT

SEQ ID NO: 25531 - protein, 446 aa, Artificial Sequence
  Description of Artificial Sequence: Synthetic polypeptide
  XENP020409 6C8_H0L0_IgG1_PVA_/S267K Heavy Chain
QVQLQQSGAELVRPGTSVKISCKAAGYTFTNYAIGWVKQRPGHGLEWIGDFYPGGGYTNYNEKFKGKATLTADTSSSTAYMQLSSLTSEDSAIYFCARGYYRVFDYWGQGTTLTVSSASTKGPSVFPLAPSSKSTSGGTAALGCLVKDYFPEPVTVSWNSGALTSGVHTFPAVLQSSGLYSLSSVVTVPSSSLGTQTYICNVNHKPSNTKVDKKVEPKSCDKTHTCPPCPAPPVAGPSVFLFPPKPKDTLMISRTPEVTCVVVDVKHEDPEVKFNWYVDGVEVHNAKTKPREEQYNSTYRVVSVLTVLHQDWLNGKEYKCKVSNKALPAPIEKTISKAKGQPREPQVYTLPPSREEMTKNQVSLTCLVKGFYPSDIAVEWESNGQPENNYKTTPPVLDSDGSFFLYSKLTVDKSRWQQGNVFSCSVMHEALHNHYTQKSLSLSPGK

SEQ ID NO: 25532 - protein, 117 aa, Artificial Sequence
  Description of Artificial Sequence: Synthetic polypeptide
  VH of XENP020409
QVQLQQSGAELVRPGTSVKISCKAAGYTFTNYAIGWVKQRPGHGLEWIGDFYPGGGYTNYNEKFKGKATLTADTSSSTAYMQLSSLTSEDSAIYFCARGYYRVFDYWGQGTTLTVSS

SEQ ID NO: 25533 - protein, 5 aa, Artificial Sequence
  Description of Artificial Sequence: Synthetic peptide
  XENP020409 vhCDR1
NYAIG

SEQ ID NO: 25534 - protein, 17 aa, Artificial Sequence
  Description of Artificial Sequence: Synthetic peptide
  XENP020409 vhCDR2
DFYPGGGYTNYNEKFKG

SEQ ID NO: 25535 - protein, 8 aa, Artificial Sequence
  Description of Artificial Sequence: Synthetic peptide
  XENP020409 vhCDR3
GYYRVFDY

SEQ ID NO: 25536 - protein, 214 aa, Artificial Sequence
  Description of Artificial Sequence: Synthetic polypeptide
  XENP020409 6C8_H0L0_IgG1_PVA_/S267K Light Chain
DIVLTQSQKFLSTSVGDRVSVTCKASQNVGSNVARCQQKPGQSPKALIYSASFRYSGVPDRFTGSGSGTDFTLTISNVQSEDLAEYFCQQYNSYPYTFGGGTKLEIKRTVAAPSVFIFPPSDEQLKSGTASVVCLLNNFYPREAKVQWKVDNALQSGNSQESVTEQDSKDSTYSLSSTLTLSKADYEKHKVYACEVTHQGLSSPVTKSFNRGEC

SEQ ID NO: 25537 - protein, 107 aa, Artificial Sequence
  Description of Artificial Sequence: Synthetic polypeptide
  VL of XENP020409
DIVLTQSQKFLSTSVGDRVSVTCKASQNVGSNVARCQQKPGQSPKALIYSASFRYSGVPDRFTGSGSGTDFTLTISNVQSEDLAEYFCQQYNSYPYTFGGGTKLEIK

SEQ ID NO: 25538 - protein, 11 aa, Artificial Sequence
  Description of Artificial Sequence: Synthetic peptide
  XENP020409 vlCDR1
KASQNVGSNVA

SEQ ID NO: 25539 - protein, 7 aa, Artificial Sequence
  Description of Artificial Sequence: Synthetic peptide
  XENP020409 vlCDR2
SASFRYS

SEQ ID NO: 25540 - protein, 9 aa, Artificial Sequence
  Description of Artificial Sequence: Synthetic peptide
  XENP020409 vlCDR3
QQYNSYPYT

SEQ ID NO: 25541 - protein, 446 aa, Artificial Sequence
  Description of Artificial Sequence: Synthetic polypeptide
  XENP020410 7C2_H0L0_IgG1_PVA_/S267K Heavy Chain
EVKVVESGGGLVKPGGSLKLSCAASGFTFSRYAISWVRQTPEKRLEWVASISSGGSTYYPDSVQGRFTISRDNARNILYLQMSSLRSEDTAMYYCARGDYEGYFDYWGQGTSLTVSSASTKGPSVFPLAPSSKSTSGGTAALGCLVKDYFPEPVTVSWNSGALTSGVHTFPAVLQSSGLYSLSSVVTVPSSSLGTQTYICNVNHKPSNTKVDKKVEPKSCDKTHTCPPCPAPPVAGPSVFLFPPKPKDTLMISRTPEVTCVVVDVKHEDPEVKFNWYVDGVEVHNAKTKPREEQYNSTYRVVSVLTVLHQDWLNGKEYKCKVSNKALPAPIEKTISKAKGQPREPQVYTLPPSREEMTKNQVSLTCLVKGFYPSDIAVEWESNGQPENNYKTTPPVLDSDGSFFLYSKLTVDKSRWQQGNVFSCSVMHEALHNHYTQKSLSLSPGK

SEQ ID NO: 25542 - protein, 117 aa, Artificial Sequence
  Description of Artificial Sequence: Synthetic polypeptide
  VH of XENP020410
EVKVVESGGGLVKPGGSLKLSCAASGFTFSRYAISWVRQTPEKRLEWVASISSGGSTYYPDSVQGRFTISRDNARNILYLQMSSLRSEDTAMYYCARGDYEGYFDYWGQGTSLTVSS

SEQ ID NO: 25543 - protein, 5 aa, Artificial Sequence
  Description of Artificial Sequence: Synthetic peptide
  XENP020410 vhCDR1
RYAIS

SEQ ID NO: 25544 - protein, 16 aa, Artificial Sequence
  Description of Artificial Sequence: Synthetic peptide
  XENP020410 vhCDR2
SISSGGSTYYPDSVQG

SEQ ID NO: 25545 - protein, 9 aa, Artificial Sequence
  Description of Artificial Sequence: Synthetic peptide
  XENP020410 vhCDR3
GDYEGYFDY

SEQ ID NO: 25546 - protein, 220 aa, Artificial Sequence
  Description of Artificial Sequence: Synthetic polypeptide
  XENP020410 7C2_H0L0_IgG1_PVA_/S267K Light Chain
DIVLTQSPSSLATSVGQKVTVSCKSSQSLLNSINQKNYLAGYQQKPGQSPKLLVYFASTRESGVPDRFIGSGSGTDFTLTISSVQAEDLADYFCQQHYSTPLTFGAGTKLELKRTVAAPSVFIFPPSDEQLKSGTASVVCLLNNFYPREAKVQWKVDNALQSGNSQESVTEQDSKDSTYSLSSTLTLSKADYEKHKVYACEVTHQGLSSPVTKSFNRGEC

SEQ ID NO: 25547 - protein, 113 aa, Artificial Sequence
  Description of Artificial Sequence: Synthetic polypeptide
  VL of XENP020410
DIVLTQSPSSLATSVGQKVTVSCKSSQSLLNSINQKNYLAGYQQKPGQSPKLLVYFASTRESGVPDRFIGSGSGTDFTLTISSVQAEDLADYFCQQHYSTPLTFGAGTKLELK

SEQ ID NO: 25548 - protein, 17 aa, Artificial Sequence
  Description of Artificial Sequence: Synthetic peptide
  XENP020410 vlCDR1
KSSQSLLNSINQKNYLA

SEQ ID NO: 25549 - protein, 7 aa, Artificial Sequence
  Description of Artificial Sequence: Synthetic peptide
  XENP020410 vlCDR2
FASTRES

SEQ ID NO: 25550 - protein, 9 aa, Artificial Sequence
  Description of Artificial Sequence: Synthetic peptide
  XENP020410 vlCDR3
QQHYSTPLT

SEQ ID NO: 25551 - protein, 442 aa, Artificial Sequence
  Description of Artificial Sequence: Synthetic polypeptide
  XENP020411 1D10_H0L0_IgG1_PVA_/S267K Heavy Chain
EVQLVESGGGLVKPGGSLKFSCAASGFAFSSFDISWVRQTPEKRLEWVAYISSDGASTFYPDTMKGRFTISRDNAKNTLYLQMSSLKSEDTAMYYCTRLGAYWGQGTLVTVSAASTKGPSVFPLAPSSKSTSGGTAALGCLVKDYFPEPVTVSWNSGALTSGVHTFPAVLQSSGLYSLSSVVTVPSSSLGTQTYICNVNHKPSNTKVDKKVEPKSCDKTHTCPPCPAPPVAGPSVFLFPPKPKDTLMISRTPEVTCVVVDVKHEDPEVKFNWYVDGVEVHNAKTKPREEQYNSTYRVVSVLTVLHQDWLNGKEYKCKVSNKALPAPIEKTISKAKGQPREPQVYTLPPSREEMTKNQVSLTCLVKGFYPSDIAVEWESNGQPENNYKTTPPVLDSDGSFFLYSKLTVDKSRWQQGNVFSCSVMHEALHNHYTQKSLSLSPGK

SEQ ID NO: 25552 - protein, 113 aa, Artificial Sequence
  Description of Artificial Sequence: Synthetic polypeptide
  VH of XENP020411
EVQLVESGGGLVKPGGSLKFSCAASGFAFSSFDISWVRQTPEKRLEWVAYISSDGASTFYPDTMKGRFTISRDNAKNTLYLQMSSLKSEDTAMYYCTRLGAYWGQGTLVTVSA

SEQ ID NO: 25553 - protein, 5 aa, Artificial Sequence
  Description of Artificial Sequence: Synthetic peptide
  XENP020411 vhCDR1
SFDIS

SEQ ID NO: 25554 - protein, 17 aa, Artificial Sequence
  Description of Artificial Sequence: Synthetic peptide
  XENP020411 vhCDR2
YISSDGASTFYPDTMKG

SEQ ID NO: 25555 - protein, 4 aa, Artificial Sequence
  Description of Artificial Sequence: Synthetic peptide
  XENP020411 vhCDR3
LGAY

SEQ ID NO: 25556 - protein, 219 aa, Artificial Sequence
  Description of Artificial Sequence: Synthetic polypeptide
  XENP020411 1D10_H0L0_IgG1_PVA_/S267K Light Chain
DVVLTQTPLTLSVTIGQPASISCKSSQSLLDSDGKTYLNWLLQRPGQSPKRLIYLVSKLDSGVPDRFTGSGSGTDFTLKISRVEAEDLGVYYCWQGTHFPYTFGGGTKLEIKRTVAAPSVFIFPPSDEQLKSGTASVVCLLNNFYPREAKVQWKVDNALQSGNSQESVTEQDSKDSTYSLSSTLTLSKADYEKHKVYACEVTHQGLSSPVTKSFNRGEC

SEQ ID NO: 25557 - protein, 112 aa, Artificial Sequence
  Description of Artificial Sequence: Synthetic polypeptide
  VL of XENP020411
DVVLTQTPLTLSVTIGQPASISCKSSQSLLDSDGKTYLNWLLQRPGQSPKRLIYLVSKLDSGVPDRFTGSGSGTDFTLKISRVEAEDLGVYYCWQGTHFPYTFGGGTKLEIK

SEQ ID NO: 25558 - protein, 16 aa, Artificial Sequence
  Description of Artificial Sequence: Synthetic peptide
  XENP020411 vlCDR1
KSSQSLLDSDGKTYLN

SEQ ID NO: 25559 - protein, 7 aa, Artificial Sequence
  Description of Artificial Sequence: Synthetic peptide
  XENP020411 vlCDR2
LVSKLDS

SEQ ID NO: 25560 - protein, 9 aa, Artificial Sequence
  Description of Artificial Sequence: Synthetic peptide
  XENP020411 vlCDR3
WQGTHFPYT

SEQ ID NO: 25561 - protein, 448 aa, Artificial Sequence
  Description of Artificial Sequence: Synthetic polypeptide
  XENP017883 4C7_H0L0_IgG1_PVA_/S267K Heavy Chain
QVQLQESGPGLVKPSETLSLTCTVHGGSINHYYWSWIRQPPGKGLEWIGYIYYSGSTKYNPSLKSRVSISVDTSKNQFSLKLTSVTAADTAVYYCAREWPYYYYEMDVWGQGTTVTVSSASTKGPSVFPLAPSSKSTSGGTAALGCLVKDYFPEPVTVSWNSGALTSGVHTFPAVLQSSGLYSLSSVVTVPSSSLGTQTYICNVNHKPSNTKVDKKVEPKSCDKTHTCPPCPAPPVAGPSVFLFPPKPKDTLMISRTPEVTCVVVDVKHEDPEVKFNWYVDGVEVHNAKTKPREEQYNSTYRVVSVLTVLHQDWLNGKEYKCKVSNKALPAPIEKTISKAKGQPREPQVYTLPPSREEMTKNQVSLTCLVKGFYPSDIAVEWESNGQPENNYKTTPPVLDSDGSFFLYSKLTVDKSRWQQGNVFSCSVMHEALHNHYTQKSLSLSPGK

SEQ ID NO: 25562 - protein, 119 aa, Artificial Sequence; identical to SEQ ID NO: 3721
  Description of Artificial Sequence: Synthetic polypeptide
  VH of XENP017883

SEQ ID NO: 25563 - protein, 5 aa, Artificial Sequence
  Description of Artificial Sequence: Synthetic peptide
  XENP017883 vhCDR1
HYYWS

SEQ ID NO: 25564 - protein, 16 aa, Artificial Sequence
  Description of Artificial Sequence: Synthetic peptide
  XENP017883 vhCDR2
YIYYSGSTKYNPSLKS

SEQ ID NO: 25565 - protein, 11 aa, Artificial Sequence
  Description of Artificial Sequence: Synthetic peptide
  XENP017883 vhCDR3
EWPYYYYEMDV

SEQ ID NO: 25566 - protein, 215 aa, Artificial Sequence
  Description of Artificial Sequence: Synthetic polypeptide
  XENP017883 4C7_H0L0_IgG1_PVA_/S267K Light Chain
EIVLTQSPGTLSLSPGERATLSCRASQSVSSSYLAWYQQKPGQAPRLLIYGASSRATGIPDRFSGSGSGTDFTLTISRLEPEDFAVYYCQQYGSSFRTFGQGTKVEIKRTVAAPSVFIFPPSDEQLKSGTASVVCLLNNFYPREAKVQWKVDNALQSGNSQESVTEQDSKDSTYSLSSTLTLSKADYEKHKVYACEVTHQGLSSPVTKSFNRGEC

SEQ ID NO: 25567 - protein, 108 aa, Artificial Sequence; identical to SEQ ID NO: 3725
  Description of Artificial Sequence: Synthetic polypeptide
  VL of XENP017883

SEQ ID NO: 25568 - protein, 12 aa, Artificial Sequence
  Description of Artificial Sequence: Synthetic peptide
  XENP017883 vlCDR1
RASQSVSSSYLA

SEQ ID NO: 25569 - protein, 7 aa, Artificial Sequence
  Description of Artificial Sequence: Synthetic peptide
  XENP017883 vlCDR2
GASSRAT

SEQ ID NO: 25570 - protein, 9 aa, Artificial Sequence
  Description of Artificial Sequence: Synthetic peptide
  XENP017883 vlCDR3
QQYGSSFRT

SEQ ID NO: 25571 - protein, 450 aa, Artificial Sequence
  Description of Artificial Sequence: Synthetic polypeptide
  XENP017884 8D5_H0L0_IgG1_PVA_/S267K Heavy Chain
EVQLVESGGGLVQPGGSLRLSCAASGFTISSYDMHWVRQATGKGLEWVSVIGPAGDTYYPGSVKGRFTISRENAKNSLYLQMNSLRAGDTAVYYCAREGMAAHNYYGMDVWGQGTTVTVSSASTKGPSVFPLAPSSKSTSGGTAALGCLVKDYFPEPVTVSWNSGALTSGVHTFPAVLQSSGLYSLSSVVTVPSSSLGTQTYICNVNHKPSNTKVDKKVEPKSCDKTHTCPPCPAPPVAGPSVFLFPPKPKDTLMISRTPEVTCVVVDVKHEDPEVKFNWYVDGVEVHNAKTKPREEQYNSTYRVVSVLTVLHQDWLNGKEYKCKVSNKALPAPIEKTISKAKGQPREPQVYTLPPSREEMTKNQVSLTCLVKGFYPSDIAVEWESNGQPENNYKTTPPVLDSDGSFFLYSKLTVDKSRWQQGNVFSCSVMHEALHNHYTQKSLSLSPGK

SEQ ID NO: 25572 - protein, 121 aa, Artificial Sequence; identical to SEQ ID NO: 3729
  Description of Artificial Sequence: Synthetic polypeptide
  VH of XENP017884

SEQ ID NO: 25573 - protein, 5 aa, Artificial Sequence
  Description of Artificial Sequence: Synthetic peptide
  XENP017884 vhCDR1
SYDMH

SEQ ID NO: 25574 - protein, 16 aa, Artificial Sequence
  Description of Artificial Sequence: Synthetic peptide
  XENP017884 vhCDR2
VIGPAGDTYYPGSVKG

SEQ ID NO: 25575 - protein, 13 aa, Artificial Sequence
  Description of Artificial Sequence: Synthetic peptide
  XENP017884 vhCDR3
EGMAAHNYYGMDV

SEQ ID NO: 25576 - protein, 215 aa, Artificial Sequence
  Description of Artificial Sequence: Synthetic polypeptide
  XENP017884 8D5_H0L0_IgG1_PVA_/S267K Light Chain
EIVLTQSPATLSLSPGERATLSCRASQSVSSYLAWYQQKPGQAPRLLIYDASNRATGIPARFSGSGSGTDFTLTISSLEPEDFAVYYCQQRSNWPPITFGQGTRLEIKRTVAAPSVFIFPPSDEQLKSGTASVVCLLNNFYPREAKVQWKVDNALQSGNSQESVTEQDSKDSTYSLSSTLTLSKADYEKHKVYACEVTHQGLSSPVTKSFNRGEC

SEQ ID NO: 25577 - protein, 108 aa, Artificial Sequence; identical to SEQ ID NO: 3733
  Description of Artificial Sequence: Synthetic polypeptide
  VL of XENP017884

SEQ ID NO: 25578 - protein, 11 aa, Artificial Sequence
  Description of Artificial Sequence: Synthetic peptide
  XENP017884 vlCDR1
RASQSVSSYLA

SEQ ID NO: 25579 - protein, 7 aa, Artificial Sequence
  Description of Artificial Sequence: Synthetic peptide
  XENP017884 vlCDR2
DASNRAT

SEQ ID NO: 25580 - protein, 10 aa, Artificial Sequence
  Description of Artificial Sequence: Synthetic peptide
  XENP017884 vlCDR3
QQRSNWPPIT

SEQ ID NO: 25581 - protein, 457 aa, Artificial Sequence
  Description of Artificial Sequence: Synthetic polypeptide
  XENP017885 E8D9_H0L0_IgG1_PVA_/S267K Heavy Chain
QITLKESGPTLVKPTQTLTLTCTFSGFSLSTSGVGVGWIRQPPGKALEWLALIYWDDDKRYSPSLKSRLTITKDTSKNQVVLTMTNMDPVDTATYYCAHTSITEVRGAIIYYYGMDVWGQGTTVTVSSASTKGPSVFPLAPSSKSTSGGTAALGCLVKDYFPEPVTVSWNSGALTSGVHTFPAVLQSSGLYSLSSVVTVPSSSLGTQTYICNVNHKPSNTKVDKKVEPKSCDKTHTCPPCPAPPVAGPSVFLFPPKPKDTLMISRTPEVTCVVVDVKHEDPEVKFNWYVDGVEVHNAKTKPREEQYNSTYRVVSVLTVLHQDWLNGKEYKCKVSNKALPAPIEKTISKAKGQPREPQVYTLPPSREEMTKNQVSLTCLVKGFYPSDIAVEWESNGQPENNYKTTPPVLDSDGSFFLYSKLTVDKSRWQQGNVFSCSVMHEALHNHYTQKSLSLSPGK

SEQ ID NO: 25582 - protein, 128 aa, Artificial Sequence
  Description of Artificial Sequence: Synthetic polypeptide
  VH of XENP017885
QITLKESGPTLVKPTQTLTLTCTFSGFSLSTSGVGVGWIRQPPGKALEWLALIYWDDDKRYSPSLKSRLTITKDTSKNQVVLTMTNMDPVDTATYYCAHTSITEVRGAIIYYYGMDVWGQGTTVTVSS

SEQ ID NO: 25583 - protein, 7 aa, Artificial Sequence
  Description of Artificial Sequence: Synthetic peptide
  XENP017885 vhCDR1
TSGVGVG

SEQ ID NO: 25584 - protein, 16 aa, Artificial Sequence
  Description of Artificial Sequence: Synthetic peptide
  XENP017885 vhCDR2
LIYWDDDKRYSPSLKS

SEQ ID NO: 25585 - protein, 18 aa, Artificial Sequence
  Description of Artificial Sequence: Synthetic peptide
  XENP017885 vhCDR3
TSITEVRGAIIYYYGMDV

SEQ ID NO: 25586 - protein, 214 aa, Artificial Sequence
  Description of Artificial Sequence: Synthetic polypeptide
  XENP017885 E8D9_H0L0_IgG1_PVA_/S267K Light Chain
EIVLTQSPGTLSLSPGERATLSCRASQSVSSSYLAWYQQKPGQAPRLLIYGASSRATGIPDRFSGSGSGTDFTLTISRLEPEDFAVYYCQQYGHSLTFGGGTKVEIKRTVAAPSVFIFPPSDEQLKSGTASVVCLLNNFYPREAKVQWKVDNALQSGNSQESVTEQDSKDSTYSLSSTLTLSKADYEKHKVYACEVTHQGLSSPVTKSFNRGEC

SEQ ID NO: 25587 - protein, 107 aa, Artificial Sequence
  Description of Artificial Sequence: Synthetic polypeptide
  VL of XENP017885
EIVLTQSPGTLSLSPGERATLSCRASQSVSSSYLAWYQQKPGQAPRLLIYGASSRATGIPDRFSGSGSGTDFTLTISRLEPEDFAVYYCQQYGHSLTFGGGTKVEIK

SEQ ID NO: 25588 - protein, 12 aa, Artificial Sequence
  Description of Artificial Sequence: Synthetic peptide
  XENP017885 vlCDR1
RASQSVSSSYLA

SEQ ID NO: 25589 - protein, 7 aa, Artificial Sequence
  Description of Artificial Sequence: Synthetic peptide
  XENP017885 vlCDR2
GASSRAT

SEQ ID NO: 25590 - protein, 8 aa, Artificial Sequence
  Description of Artificial Sequence: Synthetic peptide
  XENP017885 vlCDR3
QQYGHSLT

SEQ ID NO: 25591 - protein, 449 aa, Artificial Sequence
  Description of Artificial Sequence: Synthetic polypeptide
  XENP020267 3F6_H0L0_anti-BTLA_IgG1_PVA_/S267K Heavy Chain
EVQLQESGPSLVKPSQTLSLTCSVTGDSITSGYWNWIRKFPGNKLEYMGYLSYSGSTYYNPSLKSRISITRDTSKNQYYLQLNSVTTEDTATYYCARYFYGSYYEAMDYWGQGTSVTVSSASTKGPSVFPLAPSSKSTSGGTAALGCLVKDYFPEPVTVSWNSGALTSGVHTFPAVLQSSGLYSLSSVVTVPSSSLGTQTYICNVNHKPSNTKVDKKVEPKSCDKTHTCPPCPAPPVAGPSVFLFPPKPKDTLMISRTPEVTCVVVDVKHEDPEVKFNWYVDGVEVHNAKTKPREEQYNSTYRVVSVLTVLHQDWLNGKEYKCKVSNKALPAPIEKTISKAKGQPREPQVYTLPPSREEMTKNQVSLTCLVKGFYPSDIAVEWESNGQPENNYKTTPPVLDSDGSFFLYSKLTVDKSRWQQGNVFSCSVMHEALHNHYTQKSLSLSPGK

SEQ ID NO: 25592 - protein, 120 aa, Artificial Sequence
  Description of Artificial Sequence: Synthetic polypeptide
  VH of XENP020267
EVQLQESGPSLVKPSQTLSLTCSVTGDSITSGYWNWIRKFPGNKLEYMGYLSYSGSTYYNPSLKSRISITRDTSKNQYYLQLNSVTTEDTATYYCARYFYGSYYEAMDYWGQGTSVTVSS

SEQ ID NO: 25593 - protein, 5 aa, Artificial Sequence
  Description of Artificial Sequence: Synthetic peptide
  XENP020267 vhCDR1
SGYWN

SEQ ID NO: 25594 - protein, 16 aa, Artificial Sequence
  Description of Artificial Sequence: Synthetic peptide
  XENP020267 vhCDR2
YLSYSGSTYYNPSLKS

SEQ ID NO: 25595 - protein, 12 aa, Artificial Sequence
  Description of Artificial Sequence: Synthetic peptide
  XENP020267 vhCDR3
YFYGSYYEAMDY

SEQ ID NO: 25596 - protein, 214 aa, Artificial Sequence
  Description of Artificial Sequence: Synthetic polypeptide
  XENP020267 3F6_H0L0_anti-BTLA_IgG1_PVA_/S267K Light Chain
DVQITQSPSYLAASPGETISINCRASKSISKYLAWYQEKPGKTNKLLIYSGSTLQSGIPSRFSGSGSGTDFTLTISSLEPEDFAMYYCQQHNEYPWTFGGGTKLEIKRTVAAPSVFIFPPSDEQLKSGTASVVCLLNNFYPREAKVQWKVDNALQSGNSQESVTEQDSKDSTYSLSSTLTLSKADYEKHKVYACEVTHQGLSSPVTKSFNRGEC

SEQ ID NO: 25597 - protein, 107 aa, Artificial Sequence
  Description of Artificial Sequence: Synthetic polypeptide
  VL of XENP020267
DVQITQSPSYLAASPGETISINCRASKSISKYLAWYQEKPGKTNKLLIYSGSTLQSGIPSRFSGSGSGTDFTLTISSLEPEDFAMYYCQQHNEYPWTFGGGTKLEIK

SEQ ID NO: 25598 - protein, 11 aa, Artificial Sequence
  Description of Artificial Sequence: Synthetic peptide
  XENP020267 vlCDR1
RASKSISKYLA

SEQ ID NO: 25599 - protein, 7 aa, Artificial Sequence
  Description of Artificial Sequence: Synthetic peptide
  XENP020267 vlCDR2
SGSTLQS

SEQ ID NO: 25600 - protein, 9 aa, Artificial Sequence
  Description of Artificial Sequence: Synthetic peptide
  XENP020267 vlCDR3
QQHNEYPWT

SEQ ID NO: 25601 - protein, 448 aa, Artificial Sequence
  Description of Artificial Sequence: Synthetic polypeptide
  XENP020268 1A9_H0L0_anti-BTLA_IgG1_PVA_/S267K Heavy Chain
DVQLVESGGGLVQPGGSRKLSCAASGFTFSSFGMHWVRQAPEKGLEWVAYISSGISTIYYADTVKGRFTISRDNPKNTLFLQMTSLRSEDTAMYYCARDWLRGYAMDYWGQGTSVTVSSASTKGPSVFPLAPSSKSTSGGTAALGCLVKDYFPEPVTVSWNSGALTSGVHTFPAVLQSSGLYSLSSVVTVPSSSLGTQTYICNVNHKPSNTKVDKKVEPKSCDKTHTCPPCPAPPVAGPSVFLFPPKPKDTLMISRTPEVTCVVVDVKHEDPEVKFNWYVDGVEVHNAKTKPREEQYNSTYRVVSVLTVLHQDWLNGKEYKCKVSNKALPAPIEKTISKAKGQPREPQVYTLPPSREEMTKNQVSLTCLVKGFYPSDIAVEWESNGQPENNYKTTPPVLDSDGSFFLYSKLTVDKSRWQQGNVFSCSVMHEALHNHYTQKSLSLSPGK

SEQ ID NO: 25602 - protein, 119 aa, Artificial Sequence
  Description of Artificial Sequence: Synthetic polypeptide
  VH of XENP020268
DVQLVESGGGLVQPGGSRKLSCAASGFTFSSFGMHWVRQAPEKGLEWVAYISSGISTIYYADTVKGRFTISRDNPKNTLFLQMTSLRSEDTAMYYCARDWLRGYAMDYWGQGTSVTVSS

SEQ ID NO: 25603 - protein, 5 aa, Artificial Sequence
  Description of Artificial Sequence: Synthetic peptide
  XENP020268 vhCDR1
SFGMH

SEQ ID NO: 25604 - protein, 17 aa, Artificial Sequence
  Description of Artificial Sequence: Synthetic peptide
  XENP020268 vhCDR2
YISSGISTIYYADTVKG

SEQ ID NO: 25605 - protein, 10 aa, Artificial Sequence
  Description of Artificial Sequence: Synthetic peptide
  XENP020268 vhCDR3
DWLRGYAMDY

SEQ ID NO: 25606 - protein, 218 aa, Artificial Sequence
  Description of Artificial Sequence: Synthetic polypeptide
  XENP020268 1A9_H0L0_anti-BTLA_IgG1_PVA_/S267K Light Chain
DIVLTQSPASLAVSLGQRATISCKASQSIDYDGDSYMNWYQQKPGQPPKLLIYAASNLDFGIPARFSGSGSGTDFTLNIHPVEEEDAATYYCQQSNEDPWTFGGGTKLEIKRTVAAPSVFIFPPSDEQLKSGTASVVCLLNNFYPREAKVQWKVDNALQSGNSQESVTEQDSKDSTYSLSSTLTLSKADYEKHKVYACEVTHQGLSSPVTKSFNRGEC

SEQ ID NO: 25607 - protein, 111 aa, Artificial Sequence
  Description of Artificial Sequence: Synthetic polypeptide
  VL of XENP020268
DIVLTQSPASLAVSLGQRATISCKASQSIDYDGDSYMNWYQQKPGQPPKLLIYAASNLDFGIPARFSGSGSGTDFTLNIHPVEEEDAATYYCQQSNEDPWTFGGGTKLEIK

SEQ ID NO: 25608 - protein, 15 aa, Artificial Sequence
  Description of Artificial Sequence: Synthetic peptide
  XENP020268 vlCDR1
KASQSIDYDGDSYMN

SEQ ID NO: 25609 - protein, 7 aa, Artificial Sequence
  Description of Artificial Sequence: Synthetic peptide
  XENP020268 vlCDR2
AASNLDF

SEQ ID NO: 25610 - protein, 9 aa, Artificial Sequence
  Description of Artificial Sequence: Synthetic peptide
  XENP020268 vlCDR3
QQSNEDPWT

SEQ ID NO: 25611 - protein, 447 aa, Artificial Sequence
  Description of Artificial Sequence: Synthetic polypeptide
  XENP020269 9C6_H0L0_anti-BTLA_IgG1_PVA_/S267K Heavy Chain
QVQLKESGPGLVAPSQSLSITCTVSGFSLTGYGVNWVRQPPGKGLEWLGMIWIDGSTDYNSALKSRLSINKDNSKSQVFLKMNSLQTDDTARYYCARDRPDGRAMDYWGQGTSVTVSSASTKGPSVFPLAPSSKSTSGGTAALGCLVKDYFPEPVTVSWNSGALTSGVHTFPAVLQSSGLYSLSSVVTVPSSSLGTQTYICNVNHKPSNTKVDKKVEPKSCDKTHTCPPCPAPPVAGPSVFLFPPKPKDTLMISRTPEVTCVVVDVKHEDPEVKFNWYVDGVEVHNAKTKPREEQYNSTYRVVSVLTVLHQDWLNGKEYKCKVSNKALPAPIEKTISKAKGQPREPQVYTLPPSREEMTKNQVSLTCLVKGFYPSDIAVEWESNGQPENNYKTTPPVLDSDGSFFLYSKLTVDKSRWQQGNVFSCSVMHEALHNHYTQKSLSLSPGK

SEQ ID NO: 25612 - protein, 118 aa, Artificial Sequence
  Description of Artificial Sequence: Synthetic polypeptide
  VH of XENP020269
QVQLKESGPGLVAPSQSLSITCTVSGFSLTGYGVNWVRQPPGKGLEWLGMIWIDGSTDYNSALKSRLSINKDNSKSQVFLKMNSLQTDDTARYYCARDRPDGRAMDYWGQGTSVTVSS

SEQ ID NO: 25613 - protein, 5 aa, Artificial Sequence
  Description of Artificial Sequence: Synthetic peptide
  XENP020269 vhCDR1
GYGVN

SEQ ID NO: 25614 - protein, 16 aa, Artificial Sequence
  Description of Artificial Sequence: Synthetic peptide
  XENP020269 vhCDR2
MIWIDGSTDYNSALKS

SEQ ID NO: 25615 - protein, 10 aa, Artificial Sequence
  Description of Artificial Sequence: Synthetic peptide
  XENP020269 vhCDR3
DRPDGRAMDY

SEQ ID NO: 25616 - protein, 213 aa, Artificial Sequence
  Description of Artificial Sequence: Synthetic polypeptide
  XENP020269 9C6_H0L0_anti-BTLA_IgG1_PVA_/S267K Light Chain
SIVMTQTPKFLLVSAGDRVTITCKASQSVSNDVAWYQQKPGQSPKLLIYYASNRYTGVPDRFTGSGYGTDFTFTISTVQAEDLAVYFCQQDYSSPTFGGGTKLEIKRTVAAPSVFIFPPSDEQLKSGTASVVCLLNNFYPREAKVQWKVDNALQSGNSQESVTEQDSKDSTYSLSSTLTLSKADYEKHKVYACEVTHQGLSSPVTKSFNRGEC

SEQ ID NO: 25617 - protein, 106 aa, Artificial Sequence
  Description of Artificial Sequence: Synthetic polypeptide
  VL of XENP020269
SIVMTQTPKFLLVSAGDRVTITCKASQSVSNDVAWYQQKPGQSPKLLIYYASNRYTGVPDRFTGSGYGTDFTFTISTVQAEDLAVYFCQQDYSSPTFGGGTKLEIK

SEQ ID NO: 25618 - protein, 11 aa, Artificial Sequence
  Description of Artificial Sequence: Synthetic peptide
  XENP020269 vlCDR1
KASQSVSNDVA

SEQ ID NO: 25619 - protein, 7 aa, Artificial Sequence
  Description of Artificial Sequence: Synthetic peptide
  XENP020269 vlCDR2
YASNRYT

SEQ ID NO: 25620 - protein, 8 aa, Artificial Sequence
  Description of Artificial Sequence: Synthetic peptide
  XENP020269 vlCDR3
QQDYSSPT

SEQ ID NO: 25621 - protein, 447 aa, Artificial Sequence; identical to SEQ ID NO: 25611
  Description of Artificial Sequence: Synthetic polypeptide
  XENP020270 7H2_H0L0_anti-BTLA_IgG1_PVA_/S267K Heavy Chain

SEQ ID NO: 25622 - protein, 118 aa, Artificial Sequence; identical to SEQ ID NO: 25612
  Description of Artificial Sequence: Synthetic polypeptide
  VH of XENP020270

SEQ ID NO: 25623 - protein, 5 aa, Artificial Sequence
  Description of Artificial Sequence: Synthetic peptide
  XENP020270 vhCDR1
GYGVN

SEQ ID NO: 25624 - protein, 16 aa, Artificial Sequence
  Description of Artificial Sequence: Synthetic peptide
  XENP020270 vhCDR2
MIWIDGSTDYNSALKS

SEQ ID NO: 25625 - protein, 10 aa, Artificial Sequence
  Description of Artificial Sequence: Synthetic peptide
  XENP020270 vhCDR3
DRPDGRAMDY

SEQ ID NO: 25626 - protein, 213 aa, Artificial Sequence
  Description of Artificial Sequence: Synthetic polypeptide
  XENP020270 7H2_H0L0_anti-BTLA_IgG1_PVA_/S267K Light Chain
SIVMTQTPKFLLVSAGDRVTITCKASQSVSNDVAWYQQKPGQSPKLLIYYASNRYTGVPDRFTGSGYGTDFTFTISTVQAEDLAVYFCQQDYNSPTFGGGTKLEIKRTVAAPSVFIFPPSDEQLKSGTASVVCLLNNFYPREAKVQWKVDNALQSGNSQESVTEQDSKDSTYSLSSTLTLSKADYEKHKVYACEVTHQGLSSPVTKSFNRGEC

SEQ ID NO: 25627 - protein, 106 aa, Artificial Sequence
  Description of Artificial Sequence: Synthetic polypeptide
  VL of XENP020270
SIVMTQTPKFLLVSAGDRVTITCKASQSVSNDVAWYQQKPGQSPKLLIYYASNRYTGVPDRFTGSGYGTDFTFTISTVQAEDLAVYFCQQDYNSPTFGGGTKLEIK

SEQ ID NO: 25628 - protein, 11 aa, Artificial Sequence
  Description of Artificial Sequence: Synthetic peptide
  XENP020270 vlCDR1
KASQSVSNDVA

SEQ ID NO: 25629 - protein, 7 aa, Artificial Sequence
  Description of Artificial Sequence: Synthetic peptide
  XENP020270 vlCDR2
YASNRYT

SEQ ID NO: 25630 - protein, 8 aa, Artificial Sequence
  Description of Artificial Sequence: Synthetic peptide
  XENP020270 vlCDR3
QQDYNSPT

SEQ ID NO: 25631 - protein, 447 aa, Artificial Sequence
  Description of Artificial Sequence: Synthetic polypeptide
  XENP020271 6C3_H0L0_anti-BTLA_IgG1_PVA_/S267K Heavy Chain
EVQLQQSGAELVRSGASVKLSCTASGFNIKDYYMHWVKQRPEQGLEWIGWLDPENGDTVYVPKFQGKATMTADTSSNTAYLQLTSLTSEDSAVYYCNAGDYGSSFNYWGQGTTLTVSSASTKGPSVFPLAPSSKSTSGGTAALGCLVKDYFPEPVTVSWNSGALTSGVHTFPAVLQSSGLYSLSSVVTVPSSSLGTQTYICNVNHKPSNTKVDKKVEPKSCDKTHTCPPCPAPPVAGPSVFLFPPKPKDTLMISRTPEVTCVVVDVKHEDPEVKFNWYVDGVEVHNAKTKPREEQYNSTYRVVSVLTVLHQDWLNGKEYKCKVSNKALPAPIEKTISKAKGQPREPQVYTLPPSREEMTKNQVSLTCLVKGFYPSDIAVEWESNGQPENNYKTTPPVLDSDGSFFLYSKLTVDKSRWQQGNVFSCSVMHEALHNHYTQKSLSLSPGK

SEQ ID NO: 25632 - protein, 118 aa, Artificial Sequence
  Description of Artificial Sequence: Synthetic polypeptide
  VH of XENP020271
EVQLQQSGAELVRSGASVKLSCTASGFNIKDYYMHWVKQRPEQGLEWIGWLDPENGDTVYVPKFQGKATMTADTSSNTAYLQLTSLTSEDSAVYYCNAGDYGSSFNYWGQGTTLTVSS

SEQ ID NO: 25633 - protein, 5 aa, Artificial Sequence
  Description of Artificial Sequence: Synthetic peptide
  XENP020271 vhCDR1
DYYMH

SEQ ID NO: 25634 - protein, 17 aa, Artificial Sequence
  Description of Artificial Sequence: Synthetic peptide
  XENP020271 vhCDR2
WLDPENGDTVYVPKFQG

SEQ ID NO: 25635 - protein, 9 aa, Artificial Sequence
  Description of Artificial Sequence: Synthetic peptide
  XENP020271 vhCDR3
GDYGSSFNY

SEQ ID NO: 25636 - protein, 219 aa, Artificial Sequence
  Description of Artificial Sequence: Synthetic polypeptide
  XENP020271 6C3_H0L0_anti-BTLA_IgG1_PVA_/S267K Light Chain
DIVMSQSPSSLAVSVGEKVTMSCKSSQSLLYSGNQKNYLAWYQQRPGQSPKLLIYWASTRESGVPDRFTGSGSGTDFTLTISSVKTEDLAVYYCQQYYTYHTFGGGTKLEIKRTVAAPSVFIFPPSDEQLKSGTASVVCLLNNFYPREAKVQWKVDNALQSGNSQESVTEQDSKDSTYSLSSTLTLSKADYEKHKVYACEVTHQGLSSPVTKSFNRGEC

SEQ ID NO: 25637 - protein, 112 aa, Artificial Sequence
  Description of Artificial Sequence: Synthetic polypeptide
  VL of XENP020271
DIVMSQSPSSLAVSVGEKVTMSCKSSQSLLYSGNQKNYLAWYQQRPGQSPKLLIYWASTRESGVPDRFTGSGSGTDFTLTISSVKTEDLAVYYCQQYYTYHTFGGGTKLEIK

SEQ ID NO: 25638 - protein, 17 aa, Artificial Sequence
  Description of Artificial Sequence: Synthetic peptide
  XENP020271 vlCDR1
KSSQSLLYSGNQKNYLA

SEQ ID NO: 25639 - protein, 7 aa, Artificial Sequence
  Description of Artificial Sequence: Synthetic peptide
  XENP020271 vlCDR2
WASTRES

SEQ ID NO: 25640 - protein, 8 aa, Artificial Sequence
  Description of Artificial Sequence: Synthetic peptide
  XENP020271 vlCDR3
QQYYTYHT

SEQ ID NO: 25641 - protein, 449 aa, Artificial Sequence
  Description of Artificial Sequence: Synthetic polypeptide
  XENP020272 9C10_H0L0_anti-BTLA_IgG1_PVA_/S267K Heavy Chain
EVQLQESGPSLVKPSQTLSLTCSVTGDSITSGYWNWIRKFPGNKLEYMGYISYSGSTYYNPSLKSRISITRDTSKNQYYLQLNSVTTEDTATYYCARYYYGSYYEAMDYWGQGTSVTVSSASTKGPSVFPLAPSSKSTSGGTAALGCLVKDYFPEPVTVSWNSGALTSGVHTFPAVLQSSGLYSLSSVVTVPSSSLGTQTYICNVNHKPSNTKVDKKVEPKSCDKTHTCPPCPAPPVAGPSVFLFPPKPKDTLMISRTPEVTCVVVDVKHEDPEVKFNWYVDGVEVHNAKTKPREEQYNSTYRVVSVLTVLHQDWLNGKEYKCKVSNKALPAPIEKTISKAKGQPREPQVYTLPPSREEMTKNQVSLTCLVKGFYPSDIAVEWESNGQPENNYKTTPPVLDSDGSFFLYSKLTVDKSRWQQGNVFSCSVMHEALHNHYTQKSLSLSPGK

SEQ ID NO: 25642 - protein, 120 aa, Artificial Sequence
  Description of Artificial Sequence: Synthetic polypeptide
  VH of XENP020272
EVQLQESGPSLVKPSQTLSLTCSVTGDSITSGYWNWIRKFPGNKLEYMGYISYSGSTYYNPSLKSRISITRDTSKNQYYLQLNSVTTEDTATYYCARYYYGSYYEAMDYWGQGTSVTVSS

SEQ ID NO: 25643 - protein, 5 aa, Artificial Sequence
  Description of Artificial Sequence: Synthetic peptide
  XENP020272 vhCDR1
SGYWN

SEQ ID NO: 25644 - protein, 16 aa, Artificial Sequence
  Description of Artificial Sequence: Synthetic peptide
  XENP020272 vhCDR2
YISYSGSTYYNPSLKS

SEQ ID NO: 25645 - protein, 12 aa, Artificial Sequence
  Description of Artificial Sequence: Synthetic peptide
  XENP020272 vhCDR3
YYYGSYYEAMDY

SEQ ID NO: 25646 - protein, 214 aa, Artificial Sequence
  Description of Artificial Sequence: Synthetic polypeptide
  XENP020272 9C10_H0L0_anti-BTLA_IgG1_PVA_/S267K Light Chain
DVQITQSPSYLAASPGETITINCRASKSISKYLAWYQEKPGKTNKLLLYSGSTLQSGIPSRFSGSGSGTDFTLTISSLEPEDFAMYYCQQHNEYPWTFGGGTKLEIKRTVAAPSVFIFPPSDEQLKSGTASVVCLLNNFYPREAKVQWKVDNALQSGNSQESVTEQDSKDSTYSLSSTLTLSKADYEKHKVYACEVTHQGLSSPVTKSFNRGEC

SEQ ID NO: 25647 - protein, 107 aa, Artificial Sequence
  Description of Artificial Sequence: Synthetic polypeptide
  VL of XENP020272
DVQITQSPSYLAASPGETITINCRASKSISKYLAWYQEKPGKTNKLLLYSGSTLQSGIPSRFSGSGSGTDFTLTISSLEPEDFAMYYCQQHNEYPWTFGGGTKLEIK

SEQ ID NO: 25648 - protein, 11 aa, Artificial Sequence
  Description of Artificial Sequence: Synthetic peptide
  XENP020272 vlCDR1
RASKSISKYLA

SEQ ID NO: 25649 - protein, 7 aa, Artificial Sequence
  Description of Artificial Sequence: Synthetic peptide
  XENP020272 vlCDR2
SGSTLQS

SEQ ID NO: 25650 - protein, 9 aa, Artificial Sequence
  Description of Artificial Sequence: Synthetic peptide
  XENP020272 vlCDR3
QQHNEYPWT

SEQ ID NO: 25651 - protein, 443 aa, Artificial Sequence
  Description of Artificial Sequence: Synthetic polypeptide
  XENP020273 12E6_H0L0_anti-BTLA_IgG1_PVA_/S267K Heavy Chain
QVQLQQSGAELMKPGASVKISCKATGYTFSNYWIEWVKQRPGHGLEWIGEILPGSGGTNYNEKFKGKATFTADTSSNTAYMQLSGLTSEDSAVYYCASPRYDLWGQGTSVTASSASTKGPSVFPLAPSSKSTSGGTAALGCLVKDYFPEPVTVSWNSGALTSGVHTFPAVLQSSGLYSLSSVVTVPSSSLGTQTYICNVNHKPSNTKVDKKVEPKSCDKTHTCPPCPAPPVAGPSVFLFPPKPKDTLMISRTPEVTCVVVDVKHEDPEVKFNWYVDGVEVHNAKTKPREEQYNSTYRVVSVLTVLHQDWLNGKEYKCKVSNKALPAPIEKTISKAKGQPREPQVYTLPPSREEMTKNQVSLTCLVKGFYPSDIAVEWESNGQPENNYKTTPPVLDSDGSFFLYSKLTVDKSRWQQGNVFSCSVMHEALHNHYTQKSLSLSPGK

SEQ ID NO: 25652 - protein, 114 aa, Artificial Sequence
  Description of Artificial Sequence: Synthetic polypeptide
  VH of XENP020273
QVQLQQSGAELMKPGASVKISCKATGYTFSNYWIEWVKQRPGHGLEWIGEILPGSGGTNYNEKFKGKATFTADTSSNTAYMQLSGLTSEDSAVYYCASPRYDLWGQGTSVTASS

SEQ ID NO: 25653 - protein, 5 aa, Artificial Sequence
  Description of Artificial Sequence: Synthetic peptide
  XENP020273 vhCDR1
NYWIE

SEQ ID NO: 25654 - protein, 17 aa, Artificial Sequence
  Description of Artificial Sequence: Synthetic peptide
  XENP020273 vhCDR2
EILPGSGGTNYNEKFKG

SEQ ID NO: 25655 - protein, 5 aa, Artificial Sequence
  Description of Artificial Sequence: Synthetic peptide
  XENP020273 vhCDR3
PRYDL

SEQ ID NO: 25656 - protein, 219 aa, Artificial Sequence
  Description of Artificial Sequence: Synthetic polypeptide
  XENP020273 12E6_H0L0_anti-BTLA_IgG1_PVA_/S267K Light Chain
DVVMTQTPLTLSVTVGQPASISCKSSQSLLHSDGETYLNWFLQRPGQSPKRLIYLVSKRDSGVPDRFTGSGSGTDFTLKISRVEAEDLGVYYCWQGIHFPQTFGRGTKLEIKRTVAAPSVFIFPPSDEQLKSGTASVVCLLNNFYPREAKVQWKVDNALQSGNSQESVTEQDSKDSTYSLSSTLTLSKADYEKHKVYACEVTHQGLSSPVTKSFNRGEC

SEQ ID NO: 25657 - protein, 112 aa, Artificial Sequence
  Description of Artificial Sequence: Synthetic polypeptide
  VL of XENP020273
DVVMTQTPLTLSVTVGQPASISCKSSQSLLHSDGETYLNWFLQRPGQSPKRLIYLVSKRDSGVPDRFTGSGSGTDFTLKISRVEAEDLGVYYCWQGIHFPQTFGRGTKLEIK

SEQ ID NO: 25658 - protein, 16 aa, Artificial Sequence
  Description of Artificial Sequence: Synthetic peptide
  XENP020273 vlCDR1
KSSQSLLHSDGETYLN

SEQ ID NO: 25659 - protein, 7 aa, Artificial Sequence
  Description of Artificial Sequence: Synthetic peptide
  XENP020273 vlCDR2
LVSKRDS

SEQ ID NO: 25660 - protein, 9 aa, Artificial Sequence
  Description of Artificial Sequence: Synthetic peptide
  XENP020273 vlCDR3
WQGIHFPQT

SEQ ID NO: 25661 - protein, 442 aa, Artificial Sequence
  Description of Artificial Sequence: Synthetic polypeptide
  XENP020274 4C11A_H0L0_anti-BTLA_IgG1_PVA_/S267K Heavy Chain
QVQLQQSGAELVKPGASVKLSCKASGYTFTSYYMDWVKQRPGQGLEWIGEINPSNGDTKFNEKFKSKATLTVDKSSTTAYMQLSSLTSEDSAVYYCTRDYGYWGQGTTLTVSSASTKGPSVFPLAPSSKSTSGGTAALGCLVKDYFPEPVTVSWNSGALTSGVHTFPAVLQSSGLYSLSSVVTVPSSSLGTQTYICNVNHKPSNTKVDKKVEPKSCDKTHTCPPCPAPPVAGPSVFLFPPKPKDTLMISRTPEVTCVVVDVKHEDPEVKFNWYVDGVEVHNAKTKPREEQYNSTYRVVSVLTVLHQDWLNGKEYKCKVSNKALPAPIEKTISKAKGQPREPQVYTLPPSREEMTKNQVSLTCLVKGFYPSDIAVEWESNGQPENNYKTTPPVLDSDGSFFLYSKLTVDKSRWQQGNVFSCSVMHEALHNHYTQKSLSLSPGK

SEQ ID NO: 25662 - protein, 113 aa, Artificial Sequence
  Description of Artificial Sequence: Synthetic polypeptide
  VH of XENP020274
QVQLQQSGAELVKPGASVKLSCKASGYTFTSYYMDWVKQRPGQGLEWIGEINPSNGDTKFNEKFKSKATLTVDKSSTTAYMQLSSLTSEDSAVYYCTRDYGYWGQGTTLTVSS

SEQ ID NO: 25663 - protein, 5 aa, Artificial Sequence
  Description of Artificial Sequence: Synthetic peptide
  XENP020274 vhCDR1
SYYMD

SEQ ID NO: 25664 - protein, 17 aa, Artificial Sequence
  Description of Artificial Sequence: Synthetic peptide
  XENP020274 vhCDR2
EINPSNGDTKFNEKFKS

SEQ ID NO: 25665 - protein, 4 aa, Artificial Sequence
  Description of Artificial Sequence: Synthetic peptide
  XENP020274 vhCDR3
DYGY

SEQ ID NO: 25666 - protein, 214 aa, Artificial Sequence
  Description of Artificial Sequence: Synthetic polypeptide
  XENP020274 4C11A_H0L0_anti-BTLA_IgG1_PVA_/S267K Light Chain
DIVMTQSPATLSVTPGDRVSLSCRASQSISDYLHWYQQKSHESPRLLIKYASQSISGIPSRFSGSGSGSDFTLNINGVEPEDVGVYYCQNGHSFPPTFGGGTKLEIKRTVAAPSVFIFPPSDEQLKSGTASVVCLLNNFYPREAKVQWKVDNALQSGNSQESVTEQDSKDSTYSLSSTLTLSKADYEKHKVYACEVTHQGLSSPVTKSFNRGEC

SEQ ID NO: 25667 - protein, 107 aa, Artificial Sequence
  Description of Artificial Sequence: Synthetic polypeptide
  VL of XENP020274
DIVMTQSPATLSVTPGDRVSLSCRASQSISDYLHWYQQKSHESPRLLIKYASQSISGIPSRFSGSGSGSDFTLNINGVEPEDVGVYYCQNGHSFPPTFGGGTKLEIK

SEQ ID NO: 25668 - protein, 11 aa, Artificial Sequence
  Description of Artificial Sequence: Synthetic peptide
  XENP020274 vlCDR1
RASQSISDYLH

SEQ ID NO: 25669 - protein, 7 aa, Artificial Sequence
  Description of Artificial Sequence: Synthetic peptide
  XENP020274 vlCDR2
YASQSIS

SEQ ID NO: 25670 - protein, 9 aa, Artificial Sequence
  Description of Artificial Sequence: Synthetic peptide
  XENP020274 vlCDR3
QNGHSFPPT

SEQ ID NO: 25671 - protein, 442 aa, Artificial Sequence; identical to SEQ ID NO: 25661
  Description of Artificial Sequence: Synthetic polypeptide
  XENP020275 4C11B_H0L0_anti-BTLA_IgG1_PVA_/S267K Heavy Chain

SEQ ID NO: 25672 - protein, 113 aa, Artificial Sequence; identical to SEQ ID NO: 25662
  Description of Artificial Sequence: Synthetic polypeptide
  VH of XENP020275

SEQ ID NO: 25673 - protein, 5 aa, Artificial Sequence
  Description of Artificial Sequence: Synthetic peptide
  XENP020275 vhCDR1
SYYMD

SEQ ID NO: 25674 - protein, 17 aa, Artificial Sequence
  Description of Artificial Sequence: Synthetic peptide
  XENP020275 vhCDR2
EINPSNGDTKFNEKFKS

SEQ ID NO: 25675 - protein, 4 aa, Artificial Sequence
  Description of Artificial Sequence: Synthetic peptide
  XENP020275 vhCDR3
DYGY

SEQ ID NO: 25676 - protein, 213 aa, Artificial Sequence; identical to SEQ ID NO: 25616
  Description of Artificial Sequence: Synthetic polypeptide
  XENP020275 4C11B_H0L0_anti-BTLA_IgG1_PVA_/S267K Light Chain

SEQ ID NO: 25677 - protein, 106 aa, Artificial Sequence; identical to SEQ ID NO: 25617
  Description of Artificial Sequence: Synthetic polypeptide
  VL of XENP020275

SEQ ID NO: 25678 - protein, 11 aa, Artificial Sequence
  Description of Artificial Sequence: Synthetic peptide
  XENP020275 vlCDR1
KASQSVSNDVA

SEQ ID NO: 25679 - protein, 7 aa, Artificial Sequence
  Description of Artificial Sequence: Synthetic peptide
  XENP020275 vlCDR2
YASNRYT

SEQ ID NO: 25680 - protein, 8 aa, Artificial Sequence
  Description of Artificial Sequence: Synthetic peptide
  XENP020275 vlCDR3
QQDYSSPT

SEQ ID NO: 25681 - protein, 449 aa, Artificial Sequence
  Description of Artificial Sequence: Synthetic polypeptide
  XENP020276 7B10_H0L0_anti-BTLA_IgG1_PVA_/S267K Heavy Chain
QVTLKESGPGILQPSQTLSLTCSFSGFSLSTFGMGVNWIRQPSGKGLEWLAHIYWDDDKHYNPSLKSRLTISKDTSNNQVFLKITTVDTADTATYYCARYYRYDVPYIMDYWGQGTSVTVSSASTKGPSVFPLAPSSKSTSGGTAALGCLVKDYFPEPVTVSWNSGALTSGVHTFPAVLQSSGLYSLSSVVTVPSSSLGTQTYICNVNHKPSNTKVDKKVEPKSCDKTHTCPPCPAPPVAGPSVFLFPPKPKDTLMISRTPEVTCVVVDVKHEDPEVKFNWYVDGVEVHNAKTKPREEQYNSTYRVVSVLTVLHQDWLNGKEYKCKVSNKALPAPIEKTISKAKGQPREPQVYTLPPSREEMTKNQVSLTCLVKGFYPSDIAVEWESNGQPENNYKTTPPVLDSDGSFFLYSKLTVDKSRWQQGNVFSCSVMHEALHNHYTQKSLSLSP

SEQ ID NO: 25682 - protein, 122 aa, Artificial Sequence
  Description of Artificial Sequence: Synthetic polypeptide
  VH of XENP020276
QVTLKESGPGILQPSQTLSLTCSFSGFSLSTFGMGVNWIRQPSGKGLEWLAHIYWDDDKHYNPSLKSRLTISKDTSNNQVFLKITTVDTADTATYYCARYYRYDVPYIMDYWGQGTSVTVSS

SEQ ID NO: 25683 - protein, 7 aa, Artificial Sequence
  Description of Artificial Sequence: Synthetic peptide
  XENP020276 vhCDR1
TFGMGVN

SEQ ID NO: 25684 - protein, 16 aa, Artificial Sequence
  Description of Artificial Sequence: Synthetic peptide
  XENP020276 vhCDR2
HIYWDDDKHYNPSLKS

SEQ ID NO: 25685 - protein, 12 aa, Artificial Sequence
  Description of Artificial Sequence: Synthetic peptide
  XENP020276 vhCDR3
YYRYDVPYIMDY

SEQ ID NO: 25686 - protein, 219 aa, Artificial Sequence
  Description of Artificial Sequence: Synthetic polypeptide
  XENP020276 7B10_H0L0_anti-BTLA_IgG1_PVA_/S267K Light Chain
DIVMSQSPSSLAVSVGEKVTMSCKSSQSLLYSSNQKNYLAWYQQKPGQSPKLLIYWASTRESGVPDRFTGSGSGTDFTLTISSVKAEDLAVYYCHQYYSYYTFGGGTKLEIKRTVAAPSVFIFPPSDEQLKSGTASVVCLLNNFYPREAKVQWKVDNALQSGNSQESVTEQDSKDSTYSLSSTLTLSKADYEKHKVYACEVTHQGLSSPVTKSFNRGEC

SEQ ID NO: 25687 - protein, 112 aa, Artificial Sequence
  Description of Artificial Sequence: Synthetic polypeptide
  VL of XENP020276
DIVMSQSPSSLAVSVGEKVTMSCKSSQSLLYSSNQKNYLAWYQQKPGQSPKLLIYWASTRESGVPDRFTGSGSGTDFTLTISSVKAEDLAVYYCHQYYSYYTFGGGTKLEIK

SEQ ID NO: 25688 - protein, 17 aa, Artificial Sequence
  Description of Artificial Sequence: Synthetic peptide
  XENP020276 vlCDR1
KSSQSLLYSSNQKNYLA

SEQ ID NO: 25689 - protein, 7 aa, Artificial Sequence
  Description of Artificial Sequence: Synthetic peptide
  XENP020276 vlCDR2
WASTRES

SEQ ID NO: 25690 - protein, 8 aa, Artificial Sequence
  Description of Artificial Sequence: Synthetic peptide
  XENP020276 vlCDR3
HQYYSYYT

SEQ ID NO: 25691 - protein, 449 aa, Artificial Sequence
  Description of Artificial Sequence: Synthetic polypeptide
  XENP020277 8C1A_H0L0_anti-BTLA_IgG1_PVA_/S267K Heavy Chain
EVQLQESGPSLVKPSQTLSLTCSVTGDSVTSGYWNWIRKFPGNKLEYMGYINYSGSTYYNPSLKSRISITRDTSKNQYYLQLNSVTTEDTATYYCARSFIATVGYAMDYWGQGTSVTVSSASTKGPSVFPLAPSSKSTSGGTAALGCLVKDYFPEPVTVSWNSGALTSGVHTFPAVLQSSGLYSLSSVVTVPSSSLGTQTYICNVNHKPSNTKVDKKVEPKSCDKTHTCPPCPAPPVAGPSVFLFPPKPKDTLMISRTPEVTCVVVDVKHEDPEVKFNWYVDGVEVHNAKTKPREEQYNSTYRVVSVLTVLHQDWLNGKEYKCKVSNKALPAPIEKTISKAKGQPREPQVYTLPPSREEMTKNQVSLTCLVKGFYPSDIAVEWESNGQPENNYKTTPPVLDSDGSFFLYSKLTVDKSRWQQGNVFSCSVMHEALHNHYTQKSLSLSPGK

SEQ ID NO: 25692 - protein, 120 aa, Artificial Sequence
  Description of Artificial Sequence: Synthetic polypeptide
  VH of XENP020277
EVQLQESGPSLVKPSQTLSLTCSVTGDSVTSGYWNWIRKFPGNKLEYMGYINYSGSTYYNPSLKSRISITRDTSKNQYYLQLNSVTTEDTATYYCARSFIATVGYAMDYWGQGTSVTVSS

SEQ ID NO: 25693 - protein, 5 aa, Artificial Sequence
  Description of Artificial Sequence: Synthetic peptide
  XENP020277 vhCDR1
SGYWN

SEQ ID NO: 25694 - protein, 16 aa, Artificial Sequence
  Description of Artificial Sequence: Synthetic peptide
  XENP020277 vhCDR2
YINYSGSTYYNPSLKS

SEQ ID NO: 25695 - protein, 12 aa, Artificial Sequence
  Description of Artificial Sequence: Synthetic peptide
  XENP020277 vhCDR3
SFIATVGYAMDY

SEQ ID NO: 25696 - protein, 214 aa, Artificial Sequence
  Description of Artificial Sequence: Synthetic polypeptide
  XENP020277 8C1A_H0L0_anti-BTLA_IgG1_PVA_/S267K Light Chain
SIVMTQTPKFLLVSAGDRVTITCKASQSVNNDVSWYQQKPGQSPKLLIYSASNRYTGVPDRFTGSGYGTDFTFTISTVQAEDLAVYFCQQDYSSPWTFGGGTKLEIKRTVAAPSVFIFPPSDEQLKSGTASVVCLLNNFYPREAKVQWKVDNALQSGNSQESVTEQDSKDSTYSLSSTLTLSKADYEKHKVYACEVTHQGLSSPVTKSFNRGEC

SEQ ID NO: 25697 - protein, 107 aa, Artificial Sequence
  Description of Artificial Sequence: Synthetic polypeptide
  VL of XENP020277
SIVMTQTPKFLLVSAGDRVTITCKASQSVNNDVSWYQQKPGQSPKLLIYSASNRYTGVPDRFTGSGYGTDFTFTISTVQAEDLAVYFCQQDYSSPWTFGGGTKLEIK

SEQ ID NO: 25698 - protein, 11 aa, Artificial Sequence
  Description of Artificial Sequence: Synthetic peptide
  XENP020277 vlCDR1
KASQSVNNDVS

SEQ ID NO: 25699 - protein, 7 aa, Artificial Sequence
  Description of Artificial Sequence: Synthetic peptide
  XENP020277 vlCDR2
SASNRYT

SEQ ID NO: 25700 - protein, 9 aa, Artificial Sequence
  Description of Artificial Sequence: Synthetic peptide
  XENP020277 vlCDR3
QQDYSSPWT

SEQ ID NO: 25701 - protein, 441 aa, Artificial Sequence
  Description of Artificial Sequence: Synthetic polypeptide
  XENP020278 8C1B_H0L0_anti-BTLA_IgG1_PVA_/S267K Heavy Chain
QVQLQQPGAELVRPGASVRLSCKASGYTFTSYWIHWVKQRPGQGLEWIGNIYSSDSYTNYNQKFKDKATLTVDKSSSTAYIHLSSPTSEDSAVYYCTRVDYWGQGTTLTVSSASTKGPSVFPLAPSSKSTSGGTAALGCLVKDYFPEPVTVSWNSGALTSGVHTFPAVLQSSGLYSLSSVVTVPSSSLGTQTYICNVNHKPSNTKVDKKVEPKSCDKTHTCPPCPAPPVAGPSVFLFPPKPKDTLMISRTPEVTCVVVDVKHEDPEVKFNWYVDGVEVHNAKTKPREEQYNSTYRVVSVLTVLHQDWLNGKEYKCKVSNKALPAPIEKTISKAKGQPREPQVYTLPPSREEMTKNQVSLTCLVKGFYPSDIAVEWESNGQPENNYKTTPPVLDSDGSFFLYSKLTVDKSRWQQGNVFSCSVMHEALHNHYTQKSLSLSPGK

SEQ ID NO: 25702 - protein, 112 aa, Artificial Sequence
  Description of Artificial Sequence: Synthetic polypeptide
  VH of XENP020278
QVQLQQPGAELVRPGASVRLSCKASGYTFTSYWIHWVKQRPGQGLEWIGNIYSSDSYTNYNQKFKDKATLTVDKSSSTAYIHLSSPTSEDSAVYYCTRVDYWGQGTTLTVSS

SEQ ID NO: 25703 - protein, 5 aa, Artificial Sequence
  Description of Artificial Sequence: Synthetic peptide
  XENP020278 vhCDR1
SYWIH

SEQ ID NO: 25704 - protein, 17 aa, Artificial Sequence
  Description of Artificial Sequence: Synthetic peptide
  XENP020278 vhCDR2
NIYSSDSYTNYNQKFKD

SEQ ID NO: 25705 - protein, 3 aa, Artificial Sequence
  Description of Artificial Sequence: Synthetic peptide
  XENP020278 vhCDR3
VDY

SEQ ID NO: 25706 - protein, 214 aa, Artificial Sequence; identical to SEQ ID NO: 25696
  Description of Artificial Sequence: Synthetic polypeptide
  XENP020278 8C1B_H0L0_anti-BTLA_IgG1_PVA_/S267K Light Chain

SEQ ID NO: 25707 - protein, 107 aa, Artificial Sequence; identical to SEQ ID NO: 25697
  Description of Artificial Sequence: Synthetic polypeptide
  VL of XENP020278

SEQ ID NO: 25708 - protein, 11 aa, Artificial Sequence
  Description of Artificial Sequence: Synthetic peptide
  XENP020278 vlCDR1
KASQSVNNDVS

SEQ ID NO: 25709 - protein, 7 aa, Artificial Sequence
  Description of Artificial Sequence: Synthetic peptide
  XENP020278 vlCDR2
SASNRYT

SEQ ID NO: 25710 - protein, 9 aa, Artificial Sequence
  Description of Artificial Sequence: Synthetic peptide
  XENP020278 vlCDR3
QQDYSSPWT

SEQ ID NO: 25711 - protein, 447 aa, Artificial Sequence
  Description of Artificial Sequence: Synthetic polypeptide
  XENP020279 10B6_H0L0_anti-BTLA_IgG1_PVA_/S267K Heavy Chain
QVQLKESGPGLVAPSQSLSITCTVSGFSLTGYGVNWVRQPPGKGLEWLGMIWIDGSTDYNSALKSRLSISKDNSKSQVFLKMNSLQTDDTARYYCARDRPDGRAMDYWGQGTSVTVSSASTKGPSVFPLAPSSKSTSGGTAALGCLVKDYFPEPVTVSWNSGALTSGVHTFPAVLQSSGLYSLSSVVTVPSSSLGTQTYICNVNHKPSNTKVDKKVEPKSCDKTHTCPPCPAPPVAGPSVFLFPPKPKDTLMISRTPEVTCVVVDVKHEDPEVKFNWYVDGVEVHNAKTKPREEQYNSTYRVVSVLTVLHQDWLNGKEYKCKVSNKALPAPIEKTISKAKGQPREPQVYTLPPSREEMTKNQVSLTCLVKGFYPSDIAVEWESNGQPENNYKTTPPVLDSDGSFFLYSKLTVDKSRWQQGNVFSCSVMHEALHNHYTQKSLSLSPGK

SEQ ID NO: 25712 - protein, 118 aa, Artificial Sequence
  Description of Artificial Sequence: Synthetic polypeptide
  VH of XENP020279
QVQLKESGPGLVAPSQSLSITCTVSGFSLTGYGVNWVRQPPGKGLEWLGMIWIDGSTDYNSALKSRLSISKDNSKSQVFLKMNSLQTDDTARYYCARDRPDGRAMDYWGQGTSVTVSS

SEQ ID NO: 25713 - protein, 5 aa, Artificial Sequence
  Description of Artificial Sequence: Synthetic peptide
  XENP020279 vhCDR1
GYGVN

SEQ ID NO: 25714 - protein, 16 aa, Artificial Sequence
  Description of Artificial Sequence: Synthetic peptide
  XENP020279 vhCDR2
MIWIDGSTDYNSALKS

SEQ ID NO: 25715 - protein, 10 aa, Artificial Sequence
  Description of Artificial Sequence: Synthetic peptide
  XENP020279 vhCDR3
DRPDGRAMDY

SEQ ID NO: 25716 - protein, 213 aa, Artificial Sequence
  Description of Artificial Sequence: Synthetic polypeptide
  XENP020279 10B6_H0L0_anti-BTLA_IgG1_PVA_/S267K Light Chain
SIVMTQTPKFLLVSAGDRVTITCKASQTVSNDVTWYQQKPGQSPKLLIYYASNRYTGVPDRFTGSGYGTDFTFTISTVQAEDLAVYFCQQDYSSPTFGGGTKLEIKRTVAAPSVFIFPPSDEQLKSGTASVVCLLNNFYPREAKVQWKVDNALQSGNSQESVTEQDSKDSTYSLSSTLTLSKADYEKHKVYACEVTHQGLSSPVTKSFNRGEC

SEQ ID NO: 25717 - protein, 106 aa, Artificial Sequence
  Description of Artificial Sequence: Synthetic polypeptide
  VL of XENP020279
SIVMTQTPKFLLVSAGDRVTITCKASQTVSNDVTWYQQKPGQSPKLLIYYASNRYTGVPDRFTGSGYGTDFTFTISTVQAEDLAVYFCQQDYSSPTFGGGTKLEIK

SEQ ID NO: 25718 - protein, 11 aa, Artificial Sequence
  Description of Artificial Sequence: Synthetic peptide
  XENP020279 vlCDR1
KASQTVSNDVT

SEQ ID NO: 25719 - protein, 7 aa, Artificial Sequence
  Description of Artificial Sequence: Synthetic peptide
  XENP020279 vlCDR2
YASNRYT

SEQ ID NO: 25720 - protein, 8 aa, Artificial Sequence
  Description of Artificial Sequence: Synthetic peptide
  XENP020279 vlCDR3
QQDYSSPT

SEQ ID NO: 25721 - protein, 447 aa, Artificial Sequence; identical to SEQ ID NO: 25611
  Description of Artificial Sequence: Synthetic polypeptide
  XENP020744 9C6_H0L1_anti-BTLA_IgG1_PVA_/S267K Heavy Chain

SEQ ID NO: 25722 - protein, 118 aa, Artificial Sequence; identical to SEQ ID NO: 25612
  Description of Artificial Sequence: Synthetic polypeptide
  VH of XENP020744

SEQ ID NO: 25723 - protein, 5 aa, Artificial Sequence
  Description of Artificial Sequence: Synthetic peptide
  XENP020744 vhCDR1
GYGVN

SEQ ID NO: 25724 - protein, 16 aa, Artificial Sequence
  Description of Artificial Sequence: Synthetic peptide
  XENP020744 vhCDR2
MIWIDGSTDYNSALKS

SEQ ID NO: 25725 - protein, 10 aa, Artificial Sequence
  Description of Artificial Sequence: Synthetic peptide
  XENP020744 vhCDR3
DRPDGRAMDY

SEQ ID NO: 25726 - protein, 213 aa, Artificial Sequence; identical to SEQ ID NO: 3160
  Description of Artificial Sequence: Synthetic polypeptide
  XENP020744 9C6_H0L1_anti-BTLA_IgG1_PVA_/S267K Light Chain

SEQ ID NO: 25727 - protein, 106 aa, Artificial Sequence; identical to SEQ ID NO: 3161
  Description of Artificial Sequence: Synthetic polypeptide
  VL of XENP020744

SEQ ID NO: 25728 - protein, 11 aa, Artificial Sequence
  Description of Artificial Sequence: Synthetic peptide
  XENP020744 vlCDR1
KASQSVSNDVA

SEQ ID NO: 25729 - protein, 7 aa, Artificial Sequence
  Description of Artificial Sequence: Synthetic peptide
  XENP020744 vlCDR2
YASNRYT

SEQ ID NO: 25730 - protein, 8 aa, Artificial Sequence
  Description of Artificial Sequence: Synthetic peptide
  XENP020744 vlCDR3
QQDYSSPT

SEQ ID NO: 25731 - protein, 447 aa, Artificial Sequence; identical to SEQ ID NO: 25611
  Description of Artificial Sequence: Synthetic polypeptide
  XENP020745 9C6_H0L2_anti-BTLA_IgG1_PVA_/S267K Heavy Chain

SEQ ID NO: 25732 - protein, 118 aa, Artificial Sequence; identical to SEQ ID NO: 25612
  Description of Artificial Sequence: Synthetic polypeptide
  VH of XENP020745

SEQ ID NO: 25733 - protein, 5 aa, Artificial Sequence
  Description of Artificial Sequence: Synthetic peptide
  XENP020745 vhCDR1
GYGVN

SEQ ID NO: 25734 - protein, 16 aa, Artificial Sequence
  Description of Artificial Sequence: Synthetic peptide
  XENP020745 vhCDR2
MIWIDGSTDYNSALKS

SEQ ID NO: 25735 - protein, 10 aa, Artificial Sequence
  Description of Artificial Sequence: Synthetic peptide
  XENP020745 vhCDR3
DRPDGRAMDY

SEQ ID NO: 25736 - protein, 213 aa, Artificial Sequence
  Description of Artificial Sequence: Synthetic polypeptide
  XENP020745 9C6_H0L2_anti-BTLA_IgG1_PVA_/S267K Light Chain
SIVMTQSPLSLPVTPGEPASISCRASQSVSNDVAWYLQKPGQSPQLLIYYASNRYTGVPDRFTGSGYGTDFTLKISRVEAEDVGVYFCQQDYSSPTFGGGTKLEIKRTVAAPSVFIFPPSDEQLKSGTASVVCLLNNFYPREAKVQWKVDNALQSGNSQESVTEQDSKDSTYSLSSTLTLSKADYEKHKVYACEVTHQGLSSPVTKSFNRGEC

SEQ ID NO: 25737 - protein, 106 aa, Artificial Sequence
  Description of Artificial Sequence: Synthetic polypeptide
  VL of XENP020745
SIVMTQSPLSLPVTPGEPASISCRASQSVSNDVAWYLQKPGQSPQLLIYYASNRYTGVPDRFTGSGYGTDFTLKISRVEAEDVGVYFCQQDYSSPTFGGGTKLEIK

SEQ ID NO: 25738 - protein, 11 aa, Artificial Sequence
  Description of Artificial Sequence: Synthetic peptide
  XENP020745 vlCDR1
RASQSVSNDVA

SEQ ID NO: 25739 - protein, 7 aa, Artificial Sequence
  Description of Artificial Sequence: Synthetic peptide
  XENP020745 vlCDR2
YASNRYT

SEQ ID NO: 25740 - protein, 8 aa, Artificial Sequence
  Description of Artificial Sequence: Synthetic peptide
  XENP020745 vlCDR3
QQDYSSPT

SEQ ID NO: 25741 - protein, 447 aa, Artificial Sequence
  Description of Artificial Sequence: Synthetic polypeptide
  XENP020746 9C6_H1L0_anti-BTLA_IgG1_PVA_/S267K Heavy Chain
QVQLVQSGAEVKKPGASVKVSCKVSGFSLTGYGVNWVRQAPGQGLEWMGMIWIDGSTDYNSKFQGRVTMTKDNSKSTVYMELSSLRSEDTAVYYCARDRPDGRAMDYWGQGTMVTVSSASTKGPSVFPLAPSSKSTSGGTAALGCLVKDYFPEPVTVSWNSGALTSGVHTFPAVLQSSGLYSLSSVVTVPSSSLGTQTYICNVNHKPSNTKVDKKVEPKSCDKTHTCPPCPAPPVAGPSVFLFPPKPKDTLMISRTPEVTCVVVDVKHEDPEVKFNWYVDGVEVHNAKTKPREEQYNSTYRVVSVLTVLHQDWLNGKEYKCKVSNKALPAPIEKTISKAKGQPREPQVYTLPPSREEMTKNQVSLTCLVKGFYPSDIAVEWESNGQPENNYKTTPPVLDSDGSFFLYSKLTVDKSRWQQGNVFSCSVMHEALHNHYTQKSLSLSPGK

SEQ ID NO: 25742 - protein, 118 aa, Artificial Sequence
  Description of Artificial Sequence: Synthetic polypeptide
  VH of XENP020746
QVQLVQSGAEVKKPGASVKVSCKVSGFSLTGYGVNWVRQAPGQGLEWMGMIWIDGSTDYNSKFQGRVTMTKDNSKSTVYMELSSLRSEDTAVYYCARDRPDGRAMDYWGQGTMVTVSS

SEQ ID NO: 25743 - protein, 5 aa, Artificial Sequence
  Description of Artificial Sequence: Synthetic peptide
  XENP020746 vhCDR1
GYGVN

SEQ ID NO: 25744 - protein, 16 aa, Artificial Sequence
  Description of Artificial Sequence: Synthetic peptide
  XENP020746 vhCDR2
MIWIDGSTDYNSKFQG

SEQ ID NO: 25745 - protein, 10 aa, Artificial Sequence
  Description of Artificial Sequence: Synthetic peptide
  XENP020746 vhCDR3
DRPDGRAMDY

SEQ ID NO: 25746 - protein, 213 aa, Artificial Sequence; identical to SEQ ID NO: 25616
  Description of Artificial Sequence: Synthetic polypeptide
  XENP020746 9C6_H1L0_anti-BTLA_IgG1_PVA_/S267K Light Chain

SEQ ID NO: 25747 - protein, 106 aa, Artificial Sequence; identical to SEQ ID NO: 25617
  Description of Artificial Sequence: Synthetic polypeptide
  VL of XENP020746

SEQ ID NO: 25748 - protein, 11 aa, Artificial Sequence
  Description of Artificial Sequence: Synthetic peptide
  XENP020746 vlCDR1
KASQSVSNDVA

SEQ ID NO: 25749 - protein, 7 aa, Artificial Sequence
  Description of Artificial Sequence: Synthetic peptide
  XENP020746 vlCDR2
YASNRYT

SEQ ID NO: 25750 - protein, 8 aa, Artificial Sequence
  Description of Artificial Sequence: Synthetic peptide
  XENP020746 vlCDR3
QQDYSSPT

SEQ ID NO: 25751 - protein, 447 aa, Artificial Sequence; identical to SEQ ID NO: 25741
  Description of Artificial Sequence: Synthetic polypeptide
  XENP020747 9C6_H1L1_anti-BTLA_IgG1_PVA_/S267K Heavy Chain

SEQ ID NO: 25752 - protein, 118 aa, Artificial Sequence; identical to SEQ ID NO: 25742
  Description of Artificial Sequence: Synthetic polypeptide
  VH of XENP020747

SEQ ID NO: 25753 - protein, 5 aa, Artificial Sequence
  Description of Artificial Sequence: Synthetic peptide
  XENP020747 vhCDR1
GYGVN

SEQ ID NO: 25754 - protein, 16 aa, Artificial Sequence
  Description of Artificial Sequence: Synthetic peptide
  XENP020747 vhCDR2
MIWIDGSTDYNSKFQG

SEQ ID NO: 25755 - protein, 10 aa, Artificial Sequence
  Description of Artificial Sequence: Synthetic peptide
  XENP020747 vhCDR3
DRPDGRAMDY

SEQ ID NO: 25756 - protein, 213 aa, Artificial Sequence; identical to SEQ ID NO: 3160
  Description of Artificial Sequence: Synthetic polypeptide
  XENP020747 9C6_H1L1_anti-BTLA_IgG1_PVA_/S267K Light Chain

SEQ ID NO: 25757 - protein, 106 aa, Artificial Sequence; identical to SEQ ID NO: 3161
  Description of Artificial Sequence: Synthetic polypeptide
  VL of XENP020747

SEQ ID NO: 25758 - protein, 11 aa, Artificial Sequence
  Description of Artificial Sequence: Synthetic peptide
  XENP020747 vlCDR1
KASQSVSNDVA

SEQ ID NO: 25759 - protein, 7 aa, Artificial Sequence
  Description of Artificial Sequence: Synthetic peptide
  XENP020747 vlCDR2
YASNRYT

SEQ ID NO: 25760 - protein, 8 aa, Artificial Sequence
  Description of Artificial Sequence: Synthetic peptide
  XENP020747 vlCDR3
QQDYSSPT

SEQ ID NO: 25761 - protein, 447 aa, Artificial Sequence; identical to SEQ ID NO: 25741
  Description of Artificial Sequence: Synthetic polypeptide
  XENP020748 9C6_H1L2_anti-BTLA_IgG1_PVA_/S267K Heavy Chain

SEQ ID NO: 25762 - protein, 118 aa, Artificial Sequence; identical to SEQ ID NO: 25742
  Description of Artificial Sequence: Synthetic polypeptide
  VH of XENP020748

SEQ ID NO: 25763 - protein, 5 aa, Artificial Sequence
  Description of Artificial Sequence: Synthetic peptide
  XENP020748 vhCDR1
GYGVN

SEQ ID NO: 25764 - protein, 16 aa, Artificial Sequence
  Description of Artificial Sequence: Synthetic peptide
  XENP020748 vhCDR2
MIWIDGSTDYNSKFQG

SEQ ID NO: 25765 - protein, 10 aa, Artificial Sequence
  Description of Artificial Sequence: Synthetic peptide
  XENP020748 vhCDR3
DRPDGRAMDY

SEQ ID NO: 25766 - protein, 213 aa, Artificial Sequence; identical to SEQ ID NO: 25736
  Description of Artificial Sequence: Synthetic polypeptide
  XENP020748 9C6_H1L2_anti-BTLA_IgG1_PVA_/S267K Light Chain

SEQ ID NO: 25767 - protein, 106 aa, Artificial Sequence; identical to SEQ ID NO: 25737
  Description of Artificial Sequence: Synthetic polypeptide
  VL of XENP020748

SEQ ID NO: 25768 - protein, 11 aa, Artificial Sequence
  Description of Artificial Sequence: Synthetic peptide
  XENP020748 vlCDR1
RASQSVSNDVA

SEQ ID NO: 25769 - protein, 7 aa, Artificial Sequence
  Description of Artificial Sequence: Synthetic peptide
  XENP020748 vlCDR2
YASNRYT

SEQ ID NO: 25770 - protein, 8 aa, Artificial Sequence
  Description of Artificial Sequence: Synthetic peptide
  XENP020748 vlCDR3
QQDYSSPT

SEQ ID NO: 25771 - protein, 447 aa, Artificial Sequence
  Description of Artificial Sequence: Synthetic polypeptide
  XENP020749 9C6_H2L0_anti-BTLA_IgG1_PVA_/S267K Heavy Chain
EVQLVESGGGLVQPGGSLRLSCAVSGFSLTGYGVNWVRQAPGKGLEWVSMIWIDGSTDYNPSVKGRFTISKDNSKSTVYLQMNSLRAEDTAVYYCARDRPDGRAMDYWGQGTMVTVSSASTKGPSVFPLAPSSKSTSGGTAALGCLVKDYFPEPVTVSWNSGALTSGVHTFPAVLQSSGLYSLSSVVTVPSSSLGTQTYICNVNHKPSNTKVDKKVEPKSCDKTHTCPPCPAPPVAGPSVFLFPPKPKDTLMISRTPEVTCVVVDVKHEDPEVKFNWYVDGVEVHNAKTKPREEQYNSTYRVVSVLTVLHQDWLNGKEYKCKVSNKALPAPIEKTISKAKGQPREPQVYTLPPSREEMTKNQVSLTCLVKGFYPSDIAVEWESNGQPENNYKTTPPVLDSDGSFFLYSKLTVDKSRWQQGNVFSCSVMHEALHNHYTQKSLSLSPGK

SEQ ID NO: 25772 - protein, 118 aa, Artificial Sequence
  Description of Artificial Sequence: Synthetic polypeptide
  VH of XENP020749
EVQLVESGGGLVQPGGSLRLSCAVSGFSLTGYGVNWVRQAPGKGLEWVSMIWIDGSTDYNPSVKGRFTISKDNSKSTVYLQMNSLRAEDTAVYYCARDRPDGRAMDYWGQGTMVTVSS

SEQ ID NO: 25773 - protein, 5 aa, Artificial Sequence
  Description of Artificial Sequence: Synthetic peptide
  XENP020749 vhCDR1
GYGVN

SEQ ID NO: 25774 - protein, 16 aa, Artificial Sequence
  Description of Artificial Sequence: Synthetic peptide
  XENP020749 vhCDR2
MIWIDGSTDYNPSVKG

SEQ ID NO: 25775 - protein, 10 aa, Artificial Sequence
  Description of Artificial Sequence: Synthetic peptide
  XENP020749 vhCDR3
DRPDGRAMDY

SEQ ID NO: 25776 - protein, 213 aa, Artificial Sequence; identical to SEQ ID NO: 25616
  Description of Artificial Sequence: Synthetic polypeptide
  XENP020749 9C6_H2L0_anti-BTLA_IgG1_PVA_/S267K Light Chain

SEQ ID NO: 25777 - protein, 106 aa, Artificial Sequence; identical to SEQ ID NO: 25617
  Description of Artificial Sequence: Synthetic polypeptide
  VL of XENP020749

SEQ ID NO: 25778 - protein, 11 aa, Artificial Sequence
  Description of Artificial Sequence: Synthetic peptide
  XENP020749 vlCDR1
KASQSVSNDVA

SEQ ID NO: 25779 - protein, 7 aa, Artificial Sequence
  Description of Artificial Sequence: Synthetic peptide
  XENP020749 vlCDR2
YASNRYT

SEQ ID NO: 25780 - protein, 8 aa, Artificial Sequence
  Description of Artificial Sequence: Synthetic peptide
  XENP020749 vlCDR3
QQDYSSPT

SEQ ID NO: 25781 - protein, 447 aa, Artificial Sequence; identical to SEQ ID NO: 25771
  Description of Artificial Sequence: Synthetic polypeptide
  XENP020750 9C6_H2L1_anti-BTLA_IgG1_PVA_/S267K Heavy Chain

SEQ ID NO: 25782 - protein, 118 aa, Artificial Sequence; identical to SEQ ID NO: 25772
  Description of Artificial Sequence: Synthetic polypeptide
  VH of XENP020750

SEQ ID NO: 25783 - protein, 5 aa, Artificial Sequence
  Description of Artificial Sequence: Synthetic peptide
  XENP020750 vhCDR1
GYGVN

SEQ ID NO: 25784 - protein, 16 aa, Artificial Sequence
  Description of Artificial Sequence: Synthetic peptide
  XENP020750 vhCDR2
MIWIDGSTDYNPSVKG

SEQ ID NO: 25785 - protein, 10 aa, Artificial Sequence
  Description of Artificial Sequence: Synthetic peptide
  XENP020750 vhCDR3
DRPDGRAMDY

SEQ ID NO: 25786 - protein, 213 aa, Artificial Sequence; identical to SEQ ID NO: 3160
  Description of Artificial Sequence: Synthetic polypeptide
  XENP020750 9C6_H2L1_anti-BTLA_IgG1_PVA_/S267K Light Chain

SEQ ID NO: 25787 - protein, 106 aa, Artificial Sequence; identical to SEQ ID NO: 3161
  Description of Artificial Sequence: Synthetic polypeptide
  VL of XENP020750

SEQ ID NO: 25788 - protein, 11 aa, Artificial Sequence
  Description of Artificial Sequence: Synthetic peptide
  XENP020750 vlCDR1
KASQSVSNDVA

SEQ ID NO: 25789 - protein, 7 aa, Artificial Sequence
  Description of Artificial Sequence: Synthetic peptide
  XENP020750 vlCDR2
YASNRYT

SEQ ID NO: 25790 - protein, 8 aa, Artificial Sequence
  Description of Artificial Sequence: Synthetic peptide
  XENP020750 vlCDR3
QQDYSSPT

SEQ ID NO: 25791 - protein, 447 aa, Artificial Sequence; identical to SEQ ID NO: 25771
  Description of Artificial Sequence: Synthetic polypeptide
  XENP020751 9C6_H2L2_anti-BTLA_IgG1_PVA_/S267K Heavy Chain

SEQ ID NO: 25792 - protein, 118 aa, Artificial Sequence; identical to SEQ ID NO: 25772
  Description of Artificial Sequence: Synthetic polypeptide
  VH of XENP020751

SEQ ID NO: 25793 - protein, 5 aa, Artificial Sequence
  Description of Artificial Sequence: Synthetic peptide
  XENP020751 vhCDR1
GYGVN

SEQ ID NO: 25794 - protein, 16 aa, Artificial Sequence
  Description of Artificial Sequence: Synthetic peptide
  XENP020751 vhCDR2
MIWIDGSTDYNPSVKG

SEQ ID NO: 25795 - protein, 10 aa, Artificial Sequence
  Description of Artificial Sequence: Synthetic peptide
  XENP020751 vhCDR3
DRPDGRAMDY

SEQ ID NO: 25796 - protein, 213 aa, Artificial Sequence; identical to SEQ ID NO: 25736
  Description of Artificial Sequence: Synthetic polypeptide
  XENP020751 9C6_H2L2_anti-BTLA_IgG1_PVA_/S267K Light Chain

SEQ ID NO: 25797 - protein, 106 aa, Artificial Sequence; identical to SEQ ID NO: 25737
  Description of Artificial Sequence: Synthetic polypeptide
  VL of XENP020751

SEQ ID NO: 25798 - protein, 11 aa, Artificial Sequence
  Description of Artificial Sequence: Synthetic peptide
  XENP020751 vlCDR1
RASQSVSNDVA

SEQ ID NO: 25799 - protein, 7 aa, Artificial Sequence
  Description of Artificial Sequence: Synthetic peptide
  XENP020751 vlCDR2
YASNRYT

SEQ ID NO: 25800 - protein, 8 aa, Artificial Sequence
  Description of Artificial Sequence: Synthetic peptide
  XENP020751 vlCDR3
QQDYSSPT

SEQ ID NO: 25801 - protein, 447 aa, Artificial Sequence
  Description of Artificial Sequence: Synthetic polypeptide
  XENP020752 9C6_H3L0_anti-BTLA_IgG1_PVA_/S267K Heavy Chain
QVTLKESGPVLVKPTETLTLTCTVSGFSLTGYGVNWVRQPPGKGLEWLAMIWIDGSTDYNPSLKSRLTISKDNSKSQVVLTMTNMDPVDTATYYCARDRPDGRAMDYWGQGTMVTVSSASTKGPSVFPLAPSSKSTSGGTAALGCLVKDYFPEPVTVSWNSGALTSGVHTFPAVLQSSGLYSLSSVVTVPSSSLGTQTYICNVNHKPSNTKVDKKVEPKSCDKTHTCPPCPAPPVAGPSVFLFPPKPKDTLMISRTPEVTCVVVDVKHEDPEVKFNWYVDGVEVHNAKTKPREEQYNSTYRVVSVLTVLHQDWLNGKEYKCKVSNKALPAPIEKTISKAKGQPREPQVYTLPPSREEMTKNQVSLTCLVKGFYPSDIAVEWESNGQPENNYKTTPPVLDSDGSFFLYSKLTVDKSRWQQGNVFSCSVMHEALHNHYTQKSLSLSPGK

SEQ ID NO: 25802 - protein, 118 aa, Artificial Sequence
  Description of Artificial Sequence: Synthetic polypeptide
  VH of XENP020752
QVTLKESGPVLVKPTETLTLTCTVSGFSLTGYGVNWVRQPPGKGLEWLAMIWIDGSTDYNPSLKSRLTISKDNSKSQVVLTMTNMDPVDTATYYCARDRPDGRAMDYWGQGTMVTVSS

SEQ ID NO: 25803 - protein, 5 aa, Artificial Sequence
  Description of Artificial Sequence: Synthetic peptide
  XENP020752 vhCDR1
GYGVN

SEQ ID NO: 25804 - protein, 16 aa, Artificial Sequence
  Description of Artificial Sequence: Synthetic peptide
  XENP020752 vhCDR2
MIWIDGSTDYNPSLKS

SEQ ID NO: 25805 - protein, 10 aa, Artificial Sequence
  Description of Artificial Sequence: Synthetic peptide
  XENP020752 vhCDR3
DRPDGRAMDY

SEQ ID NO: 25806 - protein, 213 aa, Artificial Sequence; identical to SEQ ID NO: 25616
  Description of Artificial Sequence: Synthetic polypeptide
  XENP020752 9C6_H3L0_anti-BTLA_IgG1_PVA_/S267K Light Chain

SEQ ID NO: 25807 - protein, 106 aa, Artificial Sequence; identical to SEQ ID NO: 25617
  Description of Artificial Sequence: Synthetic polypeptide
  VL of XENP020752

SEQ ID NO: 25808 - protein, 11 aa, Artificial Sequence
  Description of Artificial Sequence: Synthetic peptide
  XENP020752 vlCDR1
KASQSVSNDVA

SEQ ID NO: 25809 - protein, 7 aa, Artificial Sequence
  Description of Artificial Sequence: Synthetic peptide
  XENP020752 vlCDR2
YASNRYT

SEQ ID NO: 25810 - protein, 8 aa, Artificial Sequence
  Description of Artificial Sequence: Synthetic peptide
  XENP020752 vlCDR3
QQDYSSPT

SEQ ID NO: 25811 - protein, 447 aa, Artificial Sequence; identical to SEQ ID NO: 25801
  Description of Artificial Sequence: Synthetic polypeptide
  XENP020753 9C6_H3L1_anti-BTLA_IgG1_PVA_/S267K Heavy Chain

SEQ ID NO: 25812 - protein, 118 aa, Artificial Sequence; identical to SEQ ID NO: 25802
  Description of Artificial Sequence: Synthetic polypeptide
  VH of XENP020753

SEQ ID NO: 25813 - protein, 5 aa, Artificial Sequence
  Description of Artificial Sequence: Synthetic peptide
  XENP020753 vhCDR1
GYGVN

SEQ ID NO: 25814 - protein, 16 aa, Artificial Sequence
  Description of Artificial Sequence: Synthetic peptide
  XENP020753 vhCDR2
MIWIDGSTDYNPSLKS

SEQ ID NO: 25815 - protein, 10 aa, Artificial Sequence
  Description of Artificial Sequence: Synthetic peptide
  XENP020753 vhCDR3
DRPDGRAMDY

SEQ ID NO: 25816 - protein, 213 aa, Artificial Sequence; identical to SEQ ID NO: 3160
  Description of Artificial Sequence: Synthetic polypeptide
  XENP020753 9C6_H3L1_anti-BTLA_IgG1_PVA_/S267K Light Chain

SEQ ID NO: 25817 - protein, 106 aa, Artificial Sequence; identical to SEQ ID NO: 3161
  Description of Artificial Sequence: Synthetic polypeptide
  VL of XENP020753

SEQ ID NO: 25818 - protein, 11 aa, Artificial Sequence
  Description of Artificial Sequence: Synthetic peptide
  XENP020753 vlCDR1
KASQSVSNDVA

SEQ ID NO: 25819 - protein, 7 aa, Artificial Sequence
  Description of Artificial Sequence: Synthetic peptide
  XENP020753 vlCDR2
YASNRYT

SEQ ID NO: 25820 - protein, 8 aa, Artificial Sequence
  Description of Artificial Sequence: Synthetic peptide
  XENP020753 vlCDR3
QQDYSSPT

SEQ ID NO: 25821 - protein, 447 aa, Artificial Sequence; identical to SEQ ID NO: 25801
  Description of Artificial Sequence: Synthetic polypeptide
  XENP020754 9C6_H3L2_anti-BTLA_IgG1_PVA_/S267K Heavy Chain

SEQ ID NO: 25822 - protein, 118 aa, Artificial Sequence; identical to SEQ ID NO: 25802
  Description of Artificial Sequence: Synthetic polypeptide
  VH of XENP020754

SEQ ID NO: 25823 - protein, 5 aa, Artificial Sequence
  Description of Artificial Sequence: Synthetic peptide
  XENP020754 vhCDR1
GYGVN

SEQ ID NO: 25824 - protein, 16 aa, Artificial Sequence
  Description of Artificial Sequence: Synthetic peptide
  XENP020754 vhCDR2
MIWIDGSTDYNPSLKS

SEQ ID NO: 25825 - protein, 10 aa, Artificial Sequence
  Description of Artificial Sequence: Synthetic peptide
  XENP020754 vhCDR3
DRPDGRAMDY

SEQ ID NO: 25826 - protein, 213 aa, Artificial Sequence; identical to SEQ ID NO: 25736
  Description of Artificial Sequence: Synthetic polypeptide
  XENP020754 9C6_H3L2_anti-BTLA_IgG1_PVA_/S267K Light Chain

SEQ ID NO: 25827 - protein, 106 aa, Artificial Sequence; identical to SEQ ID NO: 25737
  Description of Artificial Sequence: Synthetic polypeptide
  VL of XENP020754

SEQ ID NO: 25828 - protein, 11 aa, Artificial Sequence
  Description of Artificial Sequence: Synthetic peptide
  XENP020754 vlCDR1
RASQSVSNDVA

SEQ ID NO: 25829 - protein, 7 aa, Artificial Sequence
  Description of Artificial Sequence: Synthetic peptide
  XENP020754 vlCDR2
YASNRYT

SEQ ID NO: 25830 - protein, 8 aa, Artificial Sequence
  Description of Artificial Sequence: Synthetic peptide
  XENP020754 vlCDR3
QQDYSSPT

SEQ ID NO: 25831 - protein, 443 aa, Artificial Sequence; identical to SEQ ID NO: 25651
  Description of Artificial Sequence: Synthetic polypeptide
  XENP020758 12E6_H0L1_anti-BTLA_IgG1_PVA_/S267K Heavy Chain

SEQ ID NO: 25832 - protein, 5 aa, Artificial Sequence
  Description of Artificial Sequence: Synthetic peptide
  XENP020758 vhCDR1
NYWIE

SEQ ID NO: 25833 - protein, 17 aa, Artificial Sequence
  Description of Artificial Sequence: Synthetic peptide
  XENP020758 vhCDR2
EILPGSGGTNYNEKFKG

SEQ ID NO: 25834 - protein, 5 aa, Artificial Sequence
  Description of Artificial Sequence: Synthetic peptide
  XENP020758 vhCDR3
PRYDL

SEQ ID NO: 25835 - protein, 219 aa, Artificial Sequence
  Description of Artificial Sequence: Synthetic polypeptide
  XENP020758 12E6_H0L1_anti-BTLA_IgG1_PVA_/S267K Light Chain
DVVLTQSPLSLPVTLGQPASISCRSSQSLLHSDGETYLNYFQQRPGQSPRRLIYLVSKRDSGVPDRFTGSGSGTDFTLKISRVEAEDVGVYYCWQGIHFPQTFGRGTKLEIKRTVAAPSVFIFPPSDEQLKSGTASVVCLLNNFYPREAKVQWKVDNALQSGNSQESVTEQDSKDSTYSLSSTLTLSKADYEKHKVYACEVTHQGLSSPVTKSFNRGEC

SEQ ID NO: 25836 - protein, 112 aa, Artificial Sequence
  Description of Artificial Sequence: Synthetic polypeptide
  VL of XENP020758
DVVLTQSPLSLPVTLGQPASISCRSSQSLLHSDGETYLNYFQQRPGQSPRRLIYLVSKRDSGVPDRFTGSGSGTDFTLKISRVEAEDVGVYYCWQGIHFPQTFGRGTKLEIK

SEQ ID NO: 25837 - protein, 16 aa, Artificial Sequence
  Description of Artificial Sequence: Synthetic peptide
  XENP020758 vlCDR1
RSSQSLLHSDGETYLN

SEQ ID NO: 25838 - protein, 7 aa, Artificial Sequence
  Description of Artificial Sequence: Synthetic peptide
  XENP020758 vlCDR2
LVSKRDS

SEQ ID NO: 25839 - protein, 9 aa, Artificial Sequence
  Description of Artificial Sequence: Synthetic peptide
  XENP020758 vlCDR3
WQGIHFPQT

SEQ ID NO: 25840 - protein, 443 aa, Artificial Sequence
  Description of Artificial Sequence: Synthetic polypeptide
  XENP020759 12E6_H1L0_anti-BTLA_IgG1_PVA_/S267K Heavy Chain
QVQLVQSGAEVKKPGASVKVSCKASGYTFSNYGIEWVRQAPGQGLEWMGEILPGSGGTNYNEKFQGRVTMTADTSINTAYMELSRLRSDDTAVYYCASPRYDLWGQGTLVTVSSASTKGPSVFPLAPSSKSTSGGTAALGCLVKDYFPEPVTVSWNSGALTSGVHTFPAVLQSSGLYSLSSVVTVPSSSLGTQTYICNVNHKPSNTKVDKKVEPKSCDKTHTCPPCPAPPVAGPSVFLFPPKPKDTLMISRTPEVTCVVVDVKHEDPEVKFNWYVDGVEVHNAKTKPREEQYNSTYRVVSVLTVLHQDWLNGKEYKCKVSNKALPAPIEKTISKAKGQPREPQVYTLPPSREEMTKNQVSLTCLVKGFYPSDIAVEWESNGQPENNYKTTPPVLDSDGSFFLYSKLTVDKSRWQQGNVFSCSVMHEALHNHYTQKSLSLSPGK

SEQ ID NO: 25841 - protein, 114 aa, Artificial Sequence
  Description of Artificial Sequence: Synthetic polypeptide
  VH of XENP020759
QVQLVQSGAEVKKPGASVKVSCKASGYTFSNYGIEWVRQAPGQGLEWMGEILPGSGGTNYNEKFQGRVTMTADTSINTAYMELSRLRSDDTAVYYCASPRYDLWGQGTLVTVSS

SEQ ID NO: 25842 - protein, 5 aa, Artificial Sequence
  Description of Artificial Sequence: Synthetic peptide
  XENP020759 vhCDR1
NYGIE

SEQ ID NO: 25843 - protein, 17 aa, Artificial Sequence
  Description of Artificial Sequence: Synthetic peptide
  XENP020759 vhCDR2
EILPGSGGTNYNEKFQG

SEQ ID NO: 25844 - protein, 5 aa, Artificial Sequence
  Description of Artificial Sequence: Synthetic peptide
  XENP020759 vhCDR3
PRYDL

SEQ ID NO: 25845 - protein, 219 aa, Artificial Sequence; identical to SEQ ID NO: 25656
  Description of Artificial Sequence: Synthetic polypeptide
  XENP020759 12E6_H1L0_anti-BTLA_IgG1_PVA_/S267K Light Chain

SEQ ID NO: 25846 - protein, 112 aa, Artificial Sequence; identical to SEQ ID NO: 25657
  Description of Artificial Sequence: Synthetic polypeptide
  VL of XENP020759

SEQ ID NO: 25847 - protein, 16 aa, Artificial Sequence
  Description of Artificial Sequence: Synthetic peptide
  XENP020759 vlCDR1
KSSQSLLHSDGETYLN

SEQ ID NO: 25848 - protein, 7 aa, Artificial Sequence
  Description of Artificial Sequence: Synthetic peptide
  XENP020759 vlCDR2
LVSKRDS

SEQ ID NO: 25849 - protein, 9 aa, Artificial Sequence
  Description of Artificial Sequence: Synthetic peptide
  XENP020759 vlCDR3
WQGIHFPQT

SEQ ID NO: 25850 - protein, 443 aa, Artificial Sequence; identical to SEQ ID NO: 25840
  Description of Artificial Sequence: Synthetic polypeptide
  XENP020760 12E6_H1L1_anti-BTLA_IgG1_PVA_/S267K Heavy Chain

SEQ ID NO: 25851 - protein, 114 aa, Artificial Sequence; identical to SEQ ID NO: 25841
  Description of Artificial Sequence: Synthetic polypeptide
  VH of XENP020760

SEQ ID NO: 25852 - protein, 5 aa, Artificial Sequence
  Description of Artificial Sequence: Synthetic peptide
  XENP020760 vhCDR1
NYGIE

SEQ ID NO: 25853 - protein, 17 aa, Artificial Sequence
  Description of Artificial Sequence: Synthetic peptide
  XENP020760 vhCDR2
EILPGSGGTNYNEKFQG

SEQ ID NO: 25854 - protein, 5 aa, Artificial Sequence
  Description of Artificial Sequence: Synthetic peptide
  XENP020760 vhCDR3
PRYDL

SEQ ID NO: 25855 - protein, 219 aa, Artificial Sequence; identical to SEQ ID NO: 25835
  Description of Artificial Sequence: Synthetic polypeptide
  XENP020760 12E6_H1L1_anti-BTLA_IgG1_PVA_/S267K Light Chain

SEQ ID NO: 25856 - protein, 112 aa, Artificial Sequence; identical to SEQ ID NO: 25836
  Description of Artificial Sequence: Synthetic polypeptide
  VL of XENP020760

SEQ ID NO: 25857 - protein, 16 aa, Artificial Sequence
  Description of Artificial Sequence: Synthetic peptide
  XENP020760 vlCDR1
RSSQSLLHSDGETYLN

SEQ ID NO: 25858 - protein, 7 aa, Artificial Sequence
  Description of Artificial Sequence: Synthetic peptide
  XENP020760 vlCDR2
LVSKRDS

SEQ ID NO: 25859 - protein, 9 aa, Artificial Sequence
  Description of Artificial Sequence: Synthetic peptide
  XENP020760 vlCDR3
WQGIHFPQT

SEQ ID NO: 25860 - protein, 443 aa, Artificial Sequence
  Description of Artificial Sequence: Synthetic polypeptide
  XENP020761 12E6_H2L0_anti-BTLA_IgG1_PVA_/S267K Heavy Chain
EVQLLESGGGLVQPGGSLRLSCAASGYTFSNYGIEWVRQAPGKGLEWVSEILPGSGGTNYNPSVKGRFTISADTSKNTAYLQMNSLRAEDTAVYYCASPRYDLWGQGTLVTVSSASTKGPSVFPLAPSSKSTSGGTAALGCLVKDYFPEPVTVSWNSGALTSGVHTFPAVLQSSGLYSLSSVVTVPSSSLGTQTYICNVNHKPSNTKVDKKVEPKSCDKTHTCPPCPAPPVAGPSVFLFPPKPKDTLMISRTPEVTCVVVDVKHEDPEVKFNWYVDGVEVHNAKTKPREEQYNSTYRVVSVLTVLHQDWLNGKEYKCKVSNKALPAPIEKTISKAKGQPREPQVYTLPPSREEMTKNQVSLTCLVKGFYPSDIAVEWESNGQPENNYKTTPPVLDSDGSFFLYSKLTVDKSRWQQGNVFSCSVMHEALHNHYTQKSLSLSPGK

SEQ ID NO: 25861 - protein, 114 aa, Artificial Sequence
  Description of Artificial Sequence: Synthetic polypeptide
  VH of XENP020761
EVQLLESGGGLVQPGGSLRLSCAASGYTFSNYGIEWVRQAPGKGLEWVSEILPGSGGTNYNPSVKGRFTISADTSKNTAYLQMNSLRAEDTAVYYCASPRYDLWGQGTLVTVSS

SEQ ID NO: 25862 - protein, 5 aa, Artificial Sequence
  Description of Artificial Sequence: Synthetic peptide
  XENP020761 vhCDR1
NYGIE

SEQ ID NO: 25863 - protein, 17 aa, Artificial Sequence
  Description of Artificial Sequence: Synthetic peptide
  XENP020761 vhCDR2
EILPGSGGTNYNPSVKG

SEQ ID NO: 25864 - protein, 5 aa, Artificial Sequence
  Description of Artificial Sequence: Synthetic peptide
  XENP020761 vhCDR3
PRYDL

SEQ ID NO: 25865 - protein, 219 aa, Artificial Sequence; identical to SEQ ID NO: 25656
  Description of Artificial Sequence: Synthetic polypeptide
  XENP020761 12E6_H2L0_anti-BTLA_IgG1_PVA_/S267K Light Chain

SEQ ID NO: 25866 - protein, 112 aa, Artificial Sequence; identical to SEQ ID NO: 25657
  Description of Artificial Sequence: Synthetic polypeptide
  VL of XENP020761

SEQ ID NO: 25867 - protein, 16 aa, Artificial Sequence
  Description of Artificial Sequence: Synthetic peptide
  XENP020761 vlCDR1
KSSQSLLHSDGETYLN

SEQ ID NO: 25868 - protein, 7 aa, Artificial Sequence
  Description of Artificial Sequence: Synthetic peptide
  XENP020761 vlCDR2
LVSKRDS

SEQ ID NO: 25869 - protein, 9 aa, Artificial Sequence
  Description of Artificial Sequence: Synthetic peptide
  XENP020761 vlCDR3
WQGIHFPQT

SEQ ID NO: 25870 - protein, 443 aa, Artificial Sequence; identical to SEQ ID NO: 25860
  Description of Artificial Sequence: Synthetic polypeptide
  XENP020762 12E6_H2L1_anti-BTLA_IgG1_PVA_/S267K Heavy Chain

SEQ ID NO: 25871 - protein, 114 aa, Artificial Sequence; identical to SEQ ID NO: 25861
  Description of Artificial Sequence: Synthetic polypeptide
  VH of XENP020762

SEQ ID NO: 25872 - protein, 5 aa, Artificial Sequence
  Description of Artificial Sequence: Synthetic peptide
  XENP020762 vhCDR1
NYGIE

SEQ ID NO: 25873 - protein, 17 aa, Artificial Sequence
  Description of Artificial Sequence: Synthetic peptide
  XENP020762 vhCDR2
EILPGSGGTNYNPSVKG

SEQ ID NO: 25874 - protein, 5 aa, Artificial Sequence
  Description of Artificial Sequence: Synthetic peptide
  XENP020762 vhCDR3
PRYDL

SEQ ID NO: 25875 - protein, 219 aa, Artificial Sequence; identical to SEQ ID NO: 25835
  Description of Artificial Sequence: Synthetic polypeptide
  XENP020762 12E6_H2L1_anti-BTLA_IgG1_PVA_/S267K Light Chain

SEQ ID NO: 25876 - protein, 112 aa, Artificial Sequence; identical to SEQ ID NO: 25836
  Description of Artificial Sequence: Synthetic polypeptide
  VL of XENP020762

SEQ ID NO: 25877 - protein, 16 aa, Artificial Sequence
  Description of Artificial Sequence: Synthetic peptide
  XENP020762 vlCDR1
RSSQSLLHSDGETYLN

SEQ ID NO: 25878 - protein, 7 aa, Artificial Sequence
  Description of Artificial Sequence: Synthetic peptide
  XENP020762 vlCDR2
LVSKRDS

SEQ ID NO: 25879 - protein, 9 aa, Artificial Sequence
  Description of Artificial Sequence: Synthetic peptide
  XENP020762 vlCDR3
WQGIHFPQT

SEQ ID NO: 25880 - protein, 447 aa, Artificial Sequence
  Description of Artificial Sequence: Synthetic polypeptide
  XENP020872 9C6_H1.1_L1_anti-BTLA_IgG1_PVA_/S267K Heavy Chain
QVQLKESGAEVKKPGASVKVSCKVSGFSLTGYGVNWVRQAPGQGLEWMGMIWIDGSTDYNSKFQGRVTMTKDNSKSTVYMELSSLRSEDTAVYYCARDRPDGRAMDYWGQGTMVTVSSASTKGPSVFPLAPSSKSTSGGTAALGCLVKDYFPEPVTVSWNSGALTSGVHTFPAVLQSSGLYSLSSVVTVPSSSLGTQTYICNVNHKPSNTKVDKKVEPKSCDKTHTCPPCPAPPVAGPSVFLFPPKPKDTLMISRTPEVTCVVVDVKHEDPEVKFNWYVDGVEVHNAKTKPREEQYNSTYRVVSVLTVLHQDWLNGKEYKCKVSNKALPAPIEKTISKAKGQPREPQVYTLPPSREEMTKNQVSLTCLVKGFYPSDIAVEWESNGQPENNYKTTPPVLDSDGSFFLYSKLTVDKSRWQQGNVFSCSVMHEALHNHYTQKSLSLSPGK

SEQ ID NO: 25881 - protein, 118 aa, Artificial Sequence; identical to SEQ ID NO: 3146
  Description of Artificial Sequence: Synthetic polypeptide
  VH of XENP020872

SEQ ID NO: 25882 - protein, 5 aa, Artificial Sequence
  Description of Artificial Sequence: Synthetic peptide
  XENP020872 vhCDR1
GYGVN

SEQ ID NO: 25883 - protein, 16 aa, Artificial Sequence
  Description of Artificial Sequence: Synthetic peptide
  XENP020872 vhCDR2
MIWIDGSTDYNSKFQG

SEQ ID NO: 25884 - protein, 10 aa, Artificial Sequence
  Description of Artificial Sequence: Synthetic peptide
  XENP020872 vhCDR3
DRPDGRAMDY

SEQ ID NO: 25885 - protein, 213 aa, Artificial Sequence; identical to SEQ ID NO: 3160
  Description of Artificial Sequence: Synthetic polypeptide
  XENP020872 9C6_H1.1_L1_anti-BTLA_IgG1_PVA_/S267K Light Chain

SEQ ID NO: 25886 - protein, 106 aa, Artificial Sequence; identical to SEQ ID NO: 3161
  Description of Artificial Sequence: Synthetic polypeptide
  VL of XENP020872

SEQ ID NO: 25887 - protein, 11 aa, Artificial Sequence
  Description of Artificial Sequence: Synthetic peptide
  XENP020872 vlCDR1
KASQSVSNDVA

SEQ ID NO: 25888 - protein, 7 aa, Artificial Sequence
  Description of Artificial Sequence: Synthetic peptide
  XENP020872 vlCDR2
YASNRYT

SEQ ID NO: 25889 - protein, 8 aa, Artificial Sequence
  Description of Artificial Sequence: Synthetic peptide
  XENP020872 vlCDR3
QQDYSSPT

SEQ ID NO: 25890 - protein, 447 aa, Artificial Sequence
  Description of Artificial Sequence: Synthetic polypeptide
  XENP020873 9C6_H1.2_L1_anti-BTLA_IgG1_PVA_/S267K Heavy Chain
QVQLVQSGPGLVAPGASVKVSCKVSGFSLTGYGVNWVRQAPGQGLEWMGMIWIDGSTDYNSKFQGRVTMTKDNSKSTVYMELSSLRSEDTAVYYCARDRPDGRAMDYWGQGTMVTVSSASTKGPSVFPLAPSSKSTSGGTAALGCLVKDYFPEPVTVSWNSGALTSGVHTFPAVLQSSGLYSLSSVVTVPSSSLGTQTYICNVNHKPSNTKVDKKVEPKSCDKTHTCPPCPAPPVAGPSVFLFPPKPKDTLMISRTPEVTCVVVDVKHEDPEVKFNWYVDGVEVHNAKTKPREEQYNSTYRVVSVLTVLHQDWLNGKEYKCKVSNKALPAPIEKTISKAKGQPREPQVYTLPPSREEMTKNQVSLTCLVKGFYPSDIAVEWESNGQPENNYKTTPPVLDSDGSFFLYSKLTVDKSRWQQGNVFSCSVMHEALHNHYTQKSLSLSPGK

SEQ ID NO: 25891 - protein, 118 aa, Artificial Sequence
  Description of Artificial Sequence: Synthetic polypeptide
  VH of XENP020873
QVQLVQSGPGLVAPGASVKVSCKVSGFSLTGYGVNWVRQAPGQGLEWMGMIWIDGSTDYNSKFQGRVTMTKDNSKSTVYMELSSLRSEDTAVYYCARDRPDGRAMDYWGQGTMVTVSS

SEQ ID NO: 25892 - protein, 5 aa, Artificial Sequence
  Description of Artificial Sequence: Synthetic peptide
  XENP020873 vhCDR1
GYGVN

SEQ ID NO: 25893 - protein, 16 aa, Artificial Sequence
  Description of Artificial Sequence: Synthetic peptide
  XENP020873 vhCDR2
MIWIDGSTDYNSKFQG

SEQ ID NO: 25894 - protein, 10 aa, Artificial Sequence
  Description of Artificial Sequence: Synthetic peptide
  XENP020873 vhCDR3
DRPDGRAMDY

SEQ ID NO: 25895 - protein, 213 aa, Artificial Sequence; identical to SEQ ID NO: 3160
  Description of Artificial Sequence: Synthetic polypeptide
  XENP020873 9C6_H1.2_L1_anti-BTLA_IgG1_PVA_/S267K Light Chain

SEQ ID NO: 25896 - protein, 106 aa, Artificial Sequence; identical to SEQ ID NO: 3161
  Description of Artificial Sequence: Synthetic polypeptide
  VL of XENP020873

SEQ ID NO: 25897 - protein, 11 aa, Artificial Sequence
  Description of Artificial Sequence: Synthetic peptide
  XENP020873 vlCDR1
KASQSVSNDVA

SEQ ID NO: 25898 - protein, 7 aa, Artificial Sequence
  Description of Artificial Sequence: Synthetic peptide
  XENP020873 vlCDR2
YASNRYT

SEQ ID NO: 25899 - protein, 8 aa, Artificial Sequence
  Description of Artificial Sequence: Synthetic peptide
  XENP020873 vlCDR3
QQDYSSPT

SEQ ID NO: 25900 - protein, 447 aa, Artificial Sequence
  Description of Artificial Sequence: Synthetic polypeptide
  XENP020874 9C6_H1.3_L1_anti-BTLA_IgG1_PVA_/S267K Heavy Chain
QVQLVQSGAEVKKPSQSVKVSCKVSGFSLTGYGVNWVRQAPGQGLEWMGMIWIDGSTDYNSKFQGRVTMTKDNSKSTVYMELSSLRSEDTAVYYCARDRPDGRAMDYWGQGTMVTVSSASTKGPSVFPLAPSSKSTSGGTAALGCLVKDYFPEPVTVSWNSGALTSGVHTFPAVLQSSGLYSLSSVVTVPSSSLGTQTYICNVNHKPSNTKVDKKVEPKSCDKTHTCPPCPAPPVAGPSVFLFPPKPKDTLMISRTPEVTCVVVDVKHEDPEVKFNWYVDGVEVHNAKTKPREEQYNSTYRVVSVLTVLHQDWLNGKEYKCKVSNKALPAPIEKTISKAKGQPREPQVYTLPPSREEMTKNQVSLTCLVKGFYPSDIAVEWESNGQPENNYKTTPPVLDSDGSFFLYSKLTVDKSRWQQGNVFSCSVMHEALHNHYTQKSLSLSPGK

SEQ ID NO: 25901 - protein, 118 aa, Artificial Sequence
  Description of Artificial Sequence: Synthetic polypeptide
  VH of XENP020874
QVQLVQSGAEVKKPSQSVKVSCKVSGFSLTGYGVNWVRQAPGQGLEWMGMIWIDGSTDYNSKFQGRVTMTKDNSKSTVYMELSSLRSEDTAVYYCARDRPDGRAMDYWGQGTMVTVSS

SEQ ID NO: 25902 - protein, 5 aa, Artificial Sequence
  Description of Artificial Sequence: Synthetic peptide
  XENP020874 vhCDR1
GYGVN

SEQ ID NO: 25903 - protein, 16 aa, Artificial Sequence
  Description of Artificial Sequence: Synthetic peptide
  XENP020874 vhCDR2
MIWIDGSTDYNSKFQG

SEQ ID NO: 25904 - protein, 10 aa, Artificial Sequence
  Description of Artificial Sequence: Synthetic peptide
  XENP020874 vhCDR3
DRPDGRAMDY

SEQ ID NO: 25905 - protein, 213 aa, Artificial Sequence; identical to SEQ ID NO: 3160
  Description of Artificial Sequence: Synthetic polypeptide
  XENP020874 9C6_H1.3_L1_anti-BTLA_IgG1_PVA_/S267K Light Chain

SEQ ID NO: 25906 - protein, 106 aa, Artificial Sequence; identical to SEQ ID NO: 3161
  Description of Artificial Sequence: Synthetic polypeptide
  VL of XENP020874

SEQ ID NO: 25907 - protein, 11 aa, Artificial Sequence
  Description of Artificial Sequence: Synthetic peptide
  XENP020874 vlCDR1
KASQSVSNDVA

SEQ ID NO: 25908 - protein, 7 aa, Artificial Sequence
  Description of Artificial Sequence: Synthetic peptide
  XENP020874 vlCDR2
YASNRYT

SEQ ID NO: 25909 - protein, 8 aa, Artificial Sequence
  Description of Artificial Sequence: Synthetic peptide
  XENP020874 vlCDR3
QQDYSSPT

SEQ ID NO: 25910 - protein, 447 aa, Artificial Sequence
  Description of Artificial Sequence: Synthetic polypeptide
  XENP020875 9C6_H1.4_L1_anti-BTLA_IgG1_PVA_/S267K Heavy Chain
QVQLVQSGAEVKKPGASLSITCKVSGFSLTGYGVNWVRQAPGQGLEWMGMIWIDGSTDYNSKFQGRVTMTKDNSKSTVYMELSSLRSEDTAVYYCARDRPDGRAMDYWGQGTMVTVSSASTKGPSVFPLAPSSKSTSGGTAALGCLVKDYFPEPVTVSWNSGALTSGVHTFPAVLQSSGLYSLSSVVTVPSSSLGTQTYICNVNHKPSNTKVDKKVEPKSCDKTHTCPPCPAPPVAGPSVFLFPPKPKDTLMISRTPEVTCVVVDVKHEDPEVKFNWYVDGVEVHNAKTKPREEQYNSTYRVVSVLTVLHQDWLNGKEYKCKVSNKALPAPIEKTISKAKGQPREPQVYTLPPSREEMTKNQVSLTCLVKGFYPSDIAVEWESNGQPENNYKTTPPVLDSDGSFFLYSKLTVDKSRWQQGNVFSCSVMHEALHNHYTQKSLSLSPGK

SEQ ID NO: 25911 - protein, 118 aa, Artificial Sequence
  Description of Artificial Sequence: Synthetic polypeptide
  VH of XENP020875
QVQLVQSGAEVKKPGASLSITCKVSGFSLTGYGVNWVRQAPGQGLEWMGMIWIDGSTDYNSKFQGRVTMTKDNSKSTVYMELSSLRSEDTAVYYCARDRPDGRAMDYWGQGTMVTVSS

SEQ ID NO: 25912 - protein, 5 aa, Artificial Sequence
  Description of Artificial Sequence: Synthetic peptide
  XENP020875 vhCDR1
GYGVN

SEQ ID NO: 25913 - protein, 16 aa, Artificial Sequence
  Description of Artificial Sequence: Synthetic peptide
  XENP020875 vhCDR2
MIWIDGSTDYNSKFQG

SEQ ID NO: 25914 - protein, 10 aa, Artificial Sequence
  Description of Artificial Sequence: Synthetic peptide
  XENP020875 vhCDR3
DRPDGRAMDY

SEQ ID NO: 25915 - protein, 213 aa, Artificial Sequence; identical to SEQ ID NO: 3160
  Description of Artificial Sequence: Synthetic polypeptide
  XENP020875 9C6_H1.4_L1_anti-BTLA_IgG1_PVA_/S267K Light Chain

SEQ ID NO: 25916 - protein, 106 aa, Artificial Sequence; identical to SEQ ID NO: 3161
  Description of Artificial Sequence: Synthetic polypeptide
  VL of XENP020875

SEQ ID NO: 25917 - protein, 11 aa, Artificial Sequence
  Description of Artificial Sequence: Synthetic peptide
  XENP020875 vlCDR1
KASQSVSNDVA

SEQ ID NO: 25918 - protein, 7 aa, Artificial Sequence
  Description of Artificial Sequence: Synthetic peptide
  XENP020875 vlCDR2
YASNRYT

SEQ ID NO: 25919 - protein, 8 aa, Artificial Sequence
  Description of Artificial Sequence: Synthetic peptide
  XENP020875 vlCDR3
QQDYSSPT

SEQ ID NO: 25920 - protein, 447 aa, Artificial Sequence
  Description of Artificial Sequence: Synthetic polypeptide
  XENP020876 9C6_H1.5_L1_anti-BTLA_IgG1_PVA_/S267K Heavy Chain
QVQLVQSGAEVKKPGASVKVSCTVSGFSLTGYGVNWVRQAPGQGLEWMGMIWIDGSTDYNSKFQGRVTMTKDNSKSTVYMELSSLRSEDTAVYYCARDRPDGRAMDYWGQGTMVTVSSASTKGPSVFPLAPSSKSTSGGTAALGCLVKDYFPEPVTVSWNSGALTSGVHTFPAVLQSSGLYSLSSVVTVPSSSLGTQTYICNVNHKPSNTKVDKKVEPKSCDKTHTCPPCPAPPVAGPSVFLFPPKPKDTLMISRTPEVTCVVVDVKHEDPEVKFNWYVDGVEVHNAKTKPREEQYNSTYRVVSVLTVLHQDWLNGKEYKCKVSNKALPAPIEKTISKAKGQPREPQVYTLPPSREEMTKNQVSLTCLVKGFYPSDIAVEWESNGQPENNYKTTPPVLDSDGSFFLYSKLTVDKSRWQQGNVFSCSVMHEALHNHYTQKSLSLSPGK

SEQ ID NO: 25921 - protein, 118 aa, Artificial Sequence
  Description of Artificial Sequence: Synthetic polypeptide
  VH of XENP020876
QVQLVQSGAEVKKPGASVKVSCTVSGFSLTGYGVNWVRQAPGQGLEWMGMIWIDGSTDYNSKFQGRVTMTKDNSKSTVYMELSSLRSEDTAVYYCARDRPDGRAMDYWGQGTMVTVSS

SEQ ID NO: 25922 - protein, 5 aa, Artificial Sequence
  Description of Artificial Sequence: Synthetic peptide
  XENP020876 vhCDR1
GYGVN

SEQ ID NO: 25923 - protein, 16 aa, Artificial Sequence
  Description of Artificial Sequence: Synthetic peptide
  XENP020876 vhCDR2
MIWIDGSTDYNSKFQG

SEQ ID NO: 25924 - protein, 10 aa, Artificial Sequence
  Description of Artificial Sequence: Synthetic peptide
  XENP020876 vhCDR3
DRPDGRAMDY

SEQ ID NO: 25925 - protein, 213 aa, Artificial Sequence; identical to SEQ ID NO: 3160
  Description of Artificial Sequence: Synthetic polypeptide
  XENP020876 9C6_H1.5_L1_anti-BTLA_IgG1_PVA_/S267K Light Chain

SEQ ID NO: 25926 - protein, 106 aa, Artificial Sequence; identical to SEQ ID NO: 3161
  Description of Artificial Sequence: Synthetic polypeptide
  VL of XENP020876

SEQ ID NO: 25927 - protein, 11 aa, Artificial Sequence
  Description of Artificial Sequence: Synthetic peptide
  XENP020876 vlCDR1
KASQSVSNDVA

SEQ ID NO: 25928 - protein, 7 aa, Artificial Sequence
  Description of Artificial Sequence: Synthetic peptide
  XENP020876 vlCDR2
YASNRYT

SEQ ID NO: 25929 - protein, 8 aa, Artificial Sequence
  Description of Artificial Sequence: Synthetic peptide
  XENP020876 vlCDR3
QQDYSSPT

SEQ ID NO: 25930 - protein, 447 aa, Artificial Sequence
  Description of Artificial Sequence: Synthetic polypeptide
  XENP020877 9C6_H1.6_L1_anti-BTLA_IgG1_PVA_/S267K Heavy Chain
QVQLVQSGAEVKKPGASVKVSCKVSGFSLTGYGVNWVRQPPGKGLEWMGMIWIDGSTDYNSKFQGRVTMTKDNSKSTVYMELSSLRSEDTAVYYCARDRPDGRAMDYWGQGTMVTVSSASTKGPSVFPLAPSSKSTSGGTAALGCLVKDYFPEPVTVSWNSGALTSGVHTFPAVLQSSGLYSLSSVVTVPSSSLGTQTYICNVNHKPSNTKVDKKVEPKSCDKTHTCPPCPAPPVAGPSVFLFPPKPKDTLMISRTPEVTCVVVDVKHEDPEVKFNWYVDGVEVHNAKTKPREEQYNSTYRVVSVLTVLHQDWLNGKEYKCKVSNKALPAPIEKTISKAKGQPREPQVYTLPPSREEMTKNQVSLTCLVKGFYPSDIAVEWESNGQPENNYKTTPPVLDSDGSFFLYSKLTVDKSRWQQGNVFSCSVMHEALHNHYTQKSLSLSPGK

SEQ ID NO: 25931 - protein, 118 aa, Artificial Sequence
  Description of Artificial Sequence: Synthetic polypeptide
  VH of XENP020877
QVQLVQSGAEVKKPGASVKVSCKVSGFSLTGYGVNWVRQPPGKGLEWMGMIWIDGSTDYNSKFQGRVTMTKDNSKSTVYMELSSLRSEDTAVYYCARDRPDGRAMDYWGQGTMVTVSS

SEQ ID NO: 25932 - protein, 5 aa, Artificial Sequence
  Description of Artificial Sequence: Synthetic peptide
  XENP020877 vhCDR1
GYGVN

SEQ ID NO: 25933 - protein, 16 aa, Artificial Sequence
  Description of Artificial Sequence: Synthetic peptide
  XENP020877 vhCDR2
MIWIDGSTDYNSKFQG

SEQ ID NO: 25934 - protein, 10 aa, Artificial Sequence
  Description of Artificial Sequence: Synthetic peptide
  XENP020877 vhCDR3
DRPDGRAMDY

SEQ ID NO: 25935 - protein, 213 aa, Artificial Sequence; identical to SEQ ID NO: 3160
  Description of Artificial Sequence: Synthetic polypeptide
  XENP020877 9C6_H1.6_L1_anti-BTLA_IgG1_PVA_/S267K Light Chain

SEQ ID NO: 25936 - protein, 106 aa, Artificial Sequence; identical to SEQ ID NO: 3161
  Description of Artificial Sequence: Synthetic polypeptide
  VL of XENP020877

SEQ ID NO: 25937 - protein, 11 aa, Artificial Sequence
  Description of Artificial Sequence: Synthetic peptide
  XENP020877 vlCDR1
KASQSVSNDVA

SEQ ID NO: 25938 - protein, 7 aa, Artificial Sequence
  Description of Artificial Sequence: Synthetic peptide
  XENP020877 vlCDR2
YASNRYT

SEQ ID NO: 25939 - protein, 8 aa, Artificial Sequence
  Description of Artificial Sequence: Synthetic peptide
  XENP020877 vlCDR3
QQDYSSPT

SEQ ID NO: 25940 - protein, 447 aa, Artificial Sequence
  Description of Artificial Sequence: Synthetic polypeptide
  XENP020878 9C6_H1.7_L1_anti-BTLA_IgG1_PVA_/S267K Heavy Chain
QVQLVQSGAEVKKPGASVKVSCKVSGFSLTGYGVNWVRQAPGQGLEWLGMIWIDGSTDYNSKFQGRVTMTKDNSKSTVYMELSSLRSEDTAVYYCARDRPDGRAMDYWGQGTMVTVSSASTKGPSVFPLAPSSKSTSGGTAALGCLVKDYFPEPVTVSWNSGALTSGVHTFPAVLQSSGLYSLSSVVTVPSSSLGTQTYICNVNHKPSNTKVDKKVEPKSCDKTHTCPPCPAPPVAGPSVFLFPPKPKDTLMISRTPEVTCVVVDVKHEDPEVKFNWYVDGVEVHNAKTKPREEQYNSTYRVVSVLTVLHQDWLNGKEYKCKVSNKALPAPIEKTISKAKGQPREPQVYTLPPSREEMTKNQVSLTCLVKGFYPSDIAVEWESNGQPENNYKTTPPVLDSDGSFFLYSKLTVDKSRWQQGNVFSCSVMHEALHNHYTQKSLSLSPGK

SEQ ID NO: 25941 - protein, 118 aa, Artificial Sequence
  Description of Artificial Sequence: Synthetic polypeptide
  VH of XENP020878
QVQLVQSGAEVKKPGASVKVSCKVSGFSLTGYGVNWVRQAPGQGLEWLGMIWIDGSTDYNSKFQGRVTMTKDNSKSTVYMELSSLRSEDTAVYYCARDRPDGRAMDYWGQGTMVTVSS

SEQ ID NO: 25942 - protein, 5 aa, Artificial Sequence
  Description of Artificial Sequence: Synthetic peptide
  XENP020878 vhCDR1
GYGVN

SEQ ID NO: 25943 - protein, 16 aa, Artificial Sequence
  Description of Artificial Sequence: Synthetic peptide
  XENP020878 vhCDR2
MIWIDGSTDYNSKFQG

SEQ ID NO: 25944 - protein, 10 aa, Artificial Sequence
  Description of Artificial Sequence: Synthetic peptide
  XENP020878 vhCDR3
DRPDGRAMDY

SEQ ID NO: 25945 - protein, 213 aa, Artificial Sequence; identical to SEQ ID NO: 3160
  Description of Artificial Sequence: Synthetic polypeptide
  XENP020878 9C6_H1.7_L1_anti-BTLA_IgG1_PVA_/S267K Light Chain

SEQ ID NO: 25946 - protein, 106 aa, Artificial Sequence; identical to SEQ ID NO: 3161
  Description of Artificial Sequence: Synthetic polypeptide
  VL of XENP020878

SEQ ID NO: 25947 - protein, 11 aa, Artificial Sequence
  Description of Artificial Sequence: Synthetic peptide
  XENP020878 vlCDR1
KASQSVSNDVA

SEQ ID NO: 25948 - protein, 7 aa, Artificial Sequence
  Description of Artificial Sequence: Synthetic peptide
  XENP020878 vlCDR2
YASNRYT

SEQ ID NO: 25949 - protein, 8 aa, Artificial Sequence
  Description of Artificial Sequence: Synthetic peptide
  XENP020878 vlCDR3
QQDYSSPT

SEQ ID NO: 25950 - protein, 447 aa, Artificial Sequence
  Description of Artificial Sequence: Synthetic polypeptide
  XENP020879 9C6_H1.8_L1_anti-BTLA_IgG1_PVA_/S267K Heavy Chain
QVQLVQSGAEVKKPGASVKVSCKVSGFSLTGYGVNWVRQAPGQGLEWMGMIWIDGSTDYNSAFQGRVTMTKDNSKSTVYMELSSLRSEDTAVYYCARDRPDGRAMDYWGQGTMVTVSSASTKGPSVFPLAPSSKSTSGGTAALGCLVKDYFPEPVTVSWNSGALTSGVHTFPAVLQSSGLYSLSSVVTVPSSSLGTQTYICNVNHKPSNTKVDKKVEPKSCDKTHTCPPCPAPPVAGPSVFLFPPKPKDTLMISRTPEVTCVVVDVKHEDPEVKFNWYVDGVEVHNAKTKPREEQYNSTYRVVSVLTVLHQDWLNGKEYKCKVSNKALPAPIEKTISKAKGQPREPQVYTLPPSREEMTKNQVSLTCLVKGFYPSDIAVEWESNGQPENNYKTTPPVLDSDGSFFLYSKLTVDKSRWQQGNVFSCSVMHEALHNHYTQKSLSLSPGK

SEQ ID NO: 25951 - protein, 118 aa, Artificial Sequence
  Description of Artificial Sequence: Synthetic polypeptide
  VH of XENP020879
QVQLVQSGAEVKKPGASVKVSCKVSGFSLTGYGVNWVRQAPGQGLEWMGMIWIDGSTDYNSAFQGRVTMTKDNSKSTVYMELSSLRSEDTAVYYCARDRPDGRAMDYWGQGTMVTVSS

SEQ ID NO: 25952 - protein, 5 aa, Artificial Sequence
  Description of Artificial Sequence: Synthetic peptide
  XENP020879 vhCDR1
GYGVN

SEQ ID NO: 25953 - protein, 16 aa, Artificial Sequence
  Description of Artificial Sequence: Synthetic peptide
  XENP020879 vhCDR2
MIWIDGSTDYNSAFQG

SEQ ID NO: 25954 - protein, 10 aa, Artificial Sequence
  Description of Artificial Sequence: Synthetic peptide
  XENP020879 vhCDR3
DRPDGRAMDY

SEQ ID NO: 25955 - protein, 213 aa, Artificial Sequence; identical to SEQ ID NO: 3160
  Description of Artificial Sequence: Synthetic polypeptide
  XENP020879 9C6_H1.8_L1_anti-BTLA_IgG1_PVA_/S267K Light Chain

SEQ ID NO: 25956 - protein, 106 aa, Artificial Sequence; identical to SEQ ID NO: 3161
  Description of Artificial Sequence: Synthetic polypeptide
  VL of XENP020879

SEQ ID NO: 25957 - protein, 11 aa, Artificial Sequence
  Description of Artificial Sequence: Synthetic peptide
  XENP020879 vlCDR1
KASQSVSNDVA

SEQ ID NO: 25958 - protein, 7 aa, Artificial Sequence
  Description of Artificial Sequence: Synthetic peptide
  XENP020879 vlCDR2
YASNRYT

SEQ ID NO: 25959 - protein, 8 aa, Artificial Sequence
  Description of Artificial Sequence: Synthetic peptide
  XENP020879 vlCDR3
QQDYSSPT

SEQ ID NO: 25960 - protein, 447 aa, Artificial Sequence
  Description of Artificial Sequence: Synthetic polypeptide
  XENP020880 9C6_H1.9_L1_anti-BTLA_IgG1_PVA_/S267K Heavy Chain
QVQLVQSGAEVKKPGASVKVSCKVSGFSLTGYGVNWVRQAPGQGLEWMGMIWIDGSTDYNSALKSRVTMTKDNSKSTVYMELSSLRSEDTAVYYCARDRPDGRAMDYWGQGTMVTVSSASTKGPSVFPLAPSSKSTSGGTAALGCLVKDYFPEPVTVSWNSGALTSGVHTFPAVLQSSGLYSLSSVVTVPSSSLGTQTYICNVNHKPSNTKVDKKVEPKSCDKTHTCPPCPAPPVAGPSVFLFPPKPKDTLMISRTPEVTCVVVDVKHEDPEVKFNWYVDGVEVHNAKTKPREEQYNSTYRVVSVLTVLHQDWLNGKEYKCKVSNKALPAPIEKTISKAKGQPREPQVYTLPPSREEMTKNQVSLTCLVKGFYPSDIAVEWESNGQPENNYKTTPPVLDSDGSFFLYSKLTVDKSRWQQGNVFSCSVMHEALHNHYTQKSLSLSPGK

SEQ ID NO: 25961 - protein, 118 aa, Artificial Sequence
  Description of Artificial Sequence: Synthetic polypeptide
  VH of XENP020880
QVQLVQSGAEVKKPGASVKVSCKVSGFSLTGYGVNWVRQAPGQGLEWMGMIWIDGSTDYNSALKSRVTMTKDNSKSTVYMELSSLRSEDTAVYYCARDRPDGRAMDYWGQGTMVTVSS

SEQ ID NO: 25962 - protein, 5 aa, Artificial Sequence
  Description of Artificial Sequence: Synthetic peptide
  XENP020880 vhCDR1
GYGVN

SEQ ID NO: 25963 - protein, 16 aa, Artificial Sequence
  Description of Artificial Sequence: Synthetic peptide
  XENP020880 vhCDR2
MIWIDGSTDYNSALKS

SEQ ID NO: 25964 - protein, 10 aa, Artificial Sequence
  Description of Artificial Sequence: Synthetic peptide
  XENP020880 vhCDR3
DRPDGRAMDY

SEQ ID NO: 25965 - protein, 213 aa, Artificial Sequence; identical to SEQ ID NO: 3160
  Description of Artificial Sequence: Synthetic polypeptide
  XENP020880 9C6_H1.9_L1_anti-BTLA_IgG1_PVA_/S267K Light Chain

SEQ ID NO: 25966 - protein, 106 aa, Artificial Sequence; identical to SEQ ID NO: 3161
  Description of Artificial Sequence: Synthetic polypeptide
  VL of XENP020880

SEQ ID NO: 25967 - protein, 11 aa, Artificial Sequence
  Description of Artificial Sequence: Synthetic peptide
  XENP020880 vlCDR1
KASQSVSNDVA

SEQ ID NO: 25968 - protein, 7 aa, Artificial Sequence
  Description of Artificial Sequence: Synthetic peptide
  XENP020880 vlCDR2
YASNRYT

SEQ ID NO: 25969 - protein, 8 aa, Artificial Sequence
  Description of Artificial Sequence: Synthetic peptide
  XENP020880 vlCDR3
QQDYSSPT

SEQ ID NO: 25970 - protein, 447 aa, Artificial Sequence
  Description of Artificial Sequence: Synthetic polypeptide
  XENP020881 9C6_H1.10_L1_anti-BTLA_IgG1_PVA_/S267K Heavy Chain
QVQLVQSGAEVKKPGASVKVSCKVSGFSLTGYGVNWVRQAPGQGLEWMGMIWIDGSTDYNSKFKGRVTMTKDNSKSTVYMELSSLRSEDTAVYYCARDRPDGRAMDYWGQGTMVTVSSASTKGPSVFPLAPSSKSTSGGTAALGCLVKDYFPEPVTVSWNSGALTSGVHTFPAVLQSSGLYSLSSVVTVPSSSLGTQTYICNVNHKPSNTKVDKKVEPKSCDKTHTCPPCPAPPVAGPSVFLFPPKPKDTLMISRTPEVTCVVVDVKHEDPEVKFNWYVDGVEVHNAKTKPREEQYNSTYRVVSVLTVLHQDWLNGKEYKCKVSNKALPAPIEKTISKAKGQPREPQVYTLPPSREEMTKNQVSLTCLVKGFYPSDIAVEWESNGQPENNYKTTPPVLDSDGSFFLYSKLTVDKSRWQQGNVFSCSVMHEALHNHYTQKSLSLSPGK

SEQ ID NO: 25971 - protein, 118 aa, Artificial Sequence
  Description of Artificial Sequence: Synthetic polypeptide
  VH of XENP020881
QVQLVQSGAEVKKPGASVKVSCKVSGFSLTGYGVNWVRQAPGQGLEWMGMIWIDGSTDYNSKFKGRVTMTKDNSKSTVYMELSSLRSEDTAVYYCARDRPDGRAMDYWGQGTMVTVSS

SEQ ID NO: 25972 - protein, 5 aa, Artificial Sequence
  Description of Artificial Sequence: Synthetic peptide
  XENP020881 vhCDR1
GYGVN

SEQ ID NO: 25973 - protein, 16 aa, Artificial Sequence
  Description of Artificial Sequence: Synthetic peptide
  XENP020881 vhCDR2
MIWIDGSTDYNSKFKG

SEQ ID NO: 25974 - protein, 10 aa, Artificial Sequence
  Description of Artificial Sequence: Synthetic peptide
  XENP020881 vhCDR3
DRPDGRAMDY

SEQ ID NO: 25975 - protein, 213 aa, Artificial Sequence; identical to SEQ ID NO: 3160
  Description of Artificial Sequence: Synthetic polypeptide
  XENP020881 9C6_H1.10_L1_anti-BTLA_IgG1_PVA_/S267K Light Chain

SEQ ID NO: 25976 - protein, 106 aa, Artificial Sequence; identical to SEQ ID NO: 3161
  Description of Artificial Sequence: Synthetic polypeptide
  VL of XENP020881

SEQ ID NO: 25977 - protein, 11 aa, Artificial Sequence
  Description of Artificial Sequence: Synthetic peptide
  XENP020881 vlCDR1
KASQSVSNDVA

SEQ ID NO: 25978 - protein, 7 aa, Artificial Sequence
  Description of Artificial Sequence: Synthetic peptide
  XENP020881 vlCDR2
YASNRYT

SEQ ID NO: 25979 - protein, 8 aa, Artificial Sequence
  Description of Artificial Sequence: Synthetic peptide
  XENP020881 vlCDR3
QQDYSSPT

SEQ ID NO: 25980 - protein, 447 aa, Artificial Sequence
  Description of Artificial Sequence: Synthetic polypeptide
  XENP020882 9C6_H1.11_L1_anti-BTLA_IgG1_PVA_/S267K Heavy Chain
QVQLVQSGAEVKKPGASVKVSCKVSGFSLTGYGVNWVRQAPGQGLEWMGMIWIDGSTDYNSKFQGRLSINKDNSKSTVYMELSSLRSEDTAVYYCARDRPDGRAMDYWGQGTMVTVSSASTKGPSVFPLAPSSKSTSGGTAALGCLVKDYFPEPVTVSWNSGALTSGVHTFPAVLQSSGLYSLSSVVTVPSSSLGTQTYICNVNHKPSNTKVDKKVEPKSCDKTHTCPPCPAPPVAGPSVFLFPPKPKDTLMISRTPEVTCVVVDVKHEDPEVKFNWYVDGVEVHNAKTKPREEQYNSTYRVVSVLTVLHQDWLNGKEYKCKVSNKALPAPIEKTISKAKGQPREPQVYTLPPSREEMTKNQVSLTCLVKGFYPSDIAVEWESNGQPENNYKTTPPVLDSDGSFFLYSKLTVDKSRWQQGNVFSCSVMHEALHNHYTQKSLSLSPGK

SEQ ID NO: 25981 - protein, 118 aa, Artificial Sequence
  Description of Artificial Sequence: Synthetic polypeptide
  VH of XENP020882
QVQLVQSGAEVKKPGASVKVSCKVSGFSLTGYGVNWVRQAPGQGLEWMGMIWIDGSTDYNSKFQGRLSINKDNSKSTVYMELSSLRSEDTAVYYCARDRPDGRAMDYWGQGTMVTVSS

SEQ ID NO: 25982 - protein, 5 aa, Artificial Sequence
  Description of Artificial Sequence: Synthetic peptide
  XENP020882 vhCDR1
GYGVN

SEQ ID NO: 25983 - protein, 16 aa, Artificial Sequence
  Description of Artificial Sequence: Synthetic peptide
  XENP020882 vhCDR2
MIWIDGSTDYNSKFQG

SEQ ID NO: 25984 - protein, 10 aa, Artificial Sequence
  Description of Artificial Sequence: Synthetic peptide
  XENP020882 vhCDR3
DRPDGRAMDY

SEQ ID NO: 25985 - protein, 213 aa, Artificial Sequence; identical to SEQ ID NO: 3160
  Description of Artificial Sequence: Synthetic polypeptide
  XENP020882 9C6_H1.11_L1_anti-BTLA_IgG1_PVA_/S267K Light Chain

SEQ ID NO: 25986 - protein, 106 aa, Artificial Sequence; identical to SEQ ID NO: 3161
  Description of Artificial Sequence: Synthetic polypeptide
  VL of XENP020882

SEQ ID NO: 25987 - protein, 11 aa, Artificial Sequence
  Description of Artificial Sequence: Synthetic peptide
  XENP020882 vlCDR1
KASQSVSNDVA

SEQ ID NO: 25988 - protein, 7 aa, Artificial Sequence
  Description of Artificial Sequence: Synthetic peptide
  XENP020882 vlCDR2
YASNRYT

SEQ ID NO: 25989 - protein, 8 aa, Artificial Sequence
  Description of Artificial Sequence: Synthetic peptide
  XENP020882 vlCDR3
QQDYSSPT

SEQ ID NO: 25990 - protein, 447 aa, Artificial Sequence
  Description of Artificial Sequence: Synthetic polypeptide
  XENP020883 9C6_H1.12_L1_anti-BTLA_IgG1_PVA_/S267K Heavy Chain
QVQLVQSGAEVKKPGASVKVSCKVSGFSLTGYGVNWVRQAPGQGLEWMGMIWIDGSTDYNSKFQGRVTMTKDNSKSQVYMELSSLRSEDTAVYYCARDRPDGRAMDYWGQGTMVTVSSASTKGPSVFPLAPSSKSTSGGTAALGCLVKDYFPEPVTVSWNSGALTSGVHTFPAVLQSSGLYSLSSVVTVPSSSLGTQTYICNVNHKPSNTKVDKKVEPKSCDKTHTCPPCPAPPVAGPSVFLFPPKPKDTLMISRTPEVTCVVVDVKHEDPEVKFNWYVDGVEVHNAKTKPREEQYNSTYRVVSVLTVLHQDWLNGKEYKCKVSNKALPAPIEKTISKAKGQPREPQVYTLPPSREEMTKNQVSLTCLVKGFYPSDIAVEWESNGQPENNYKTTPPVLDSDGSFFLYSKLTVDKSRWQQGNVFSCSVMHEALHNHYTQKSLSLSPGK

SEQ ID NO: 25991 - protein, 118 aa, Artificial Sequence
  Description of Artificial Sequence: Synthetic polypeptide
  VH of XENP020883
QVQLVQSGAEVKKPGASVKVSCKVSGFSLTGYGVNWVRQAPGQGLEWMGMIWIDGSTDYNSKFQGRVTMTKDNSKSQVYMELSSLRSEDTAVYYCARDRPDGRAMDYWGQGTMVTVSS

SEQ ID NO: 25992 - protein, 5 aa, Artificial Sequence
  Description of Artificial Sequence: Synthetic peptide
  XENP020883 vhCDR1
GYGVN

SEQ ID NO: 25993 - protein, 16 aa, Artificial Sequence
  Description of Artificial Sequence: Synthetic peptide
  XENP020883 vhCDR2
MIWIDGSTDYNSKFQG

SEQ ID NO: 25994 - protein, 10 aa, Artificial Sequence
  Description of Artificial Sequence: Synthetic peptide
  XENP020883 vhCDR3
DRPDGRAMDY

SEQ ID NO: 25995 - protein, 213 aa, Artificial Sequence; identical to SEQ ID NO: 3160
  Description of Artificial Sequence: Synthetic polypeptide
  XENP020883 9C6_H1.12_L1_anti-BTLA_IgG1_PVA_/S267K Light Chain

SEQ ID NO: 25996 - protein, 106 aa, Artificial Sequence; identical to SEQ ID NO: 3161
  Description of Artificial Sequence: Synthetic polypeptide
  VL of XENP020883

SEQ ID NO: 25997 - protein, 11 aa, Artificial Sequence
  Description of Artificial Sequence: Synthetic peptide
  XENP020883 vlCDR1
KASQSVSNDVA

SEQ ID NO: 25998 - protein, 7 aa, Artificial Sequence
  Description of Artificial Sequence: Synthetic peptide
  XENP020883 vlCDR2
YASNRYT

SEQ ID NO: 25999 - protein, 8 aa, Artificial Sequence
  Description of Artificial Sequence: Synthetic peptide
  XENP020883 vlCDR3
QQDYSSPT

SEQ ID NO: 26000 - protein, 447 aa, Artificial Sequence
  Description of Artificial Sequence: Synthetic polypeptide
  XENP020884 9C6_H1.13_L1_anti-BTLA_IgG1_PVA_/S267K Heavy Chain
QVQLVQSGAEVKKPGASVKVSCKVSGFSLTGYGVNWVRQAPGQGLEWMGMIWIDGSTDYNSKFQGRVTMTKDNSKSTVFLKMNSLRSEDTAVYYCARDRPDGRAMDYWGQGTMVTVSSASTKGPSVFPLAPSSKSTSGGTAALGCLVKDYFPEPVTVSWNSGALTSGVHTFPAVLQSSGLYSLSSVVTVPSSSLGTQTYICNVNHKPSNTKVDKKVEPKSCDKTHTCPPCPAPPVAGPSVFLFPPKPKDTLMISRTPEVTCVVVDVKHEDPEVKFNWYVDGVEVHNAKTKPREEQYNSTYRVVSVLTVLHQDWLNGKEYKCKVSNKALPAPIEKTISKAKGQPREPQVYTLPPSREEMTKNQVSLTCLVKGFYPSDIAVEWESNGQPENNYKTTPPVLDSDGSFFLYSKLTVDKSRWQQGNVFSCSVMHEALHNHYTQKSLSLSPGK

SEQ ID NO: 26001 - protein, 118 aa, Artificial Sequence
  Description of Artificial Sequence: Synthetic polypeptide
  VH of XENP020884
QVQLVQSGAEVKKPGASVKVSCKVSGFSLTGYGVNWVRQAPGQGLEWMGMIWIDGSTDYNSKFQGRVTMTKDNSKSTVFLKMNSLRSEDTAVYYCARDRPDGRAMDYWGQGTMVTVSS

SEQ ID NO: 26002 - protein, 5 aa, Artificial Sequence
  Description of Artificial Sequence: Synthetic peptide
  XENP020884 vhCDR1
GYGVN

SEQ ID NO: 26003 - protein, 16 aa, Artificial Sequence
  Description of Artificial Sequence: Synthetic peptide
  XENP020884 vhCDR2
MIWIDGSTDYNSKFQG

SEQ ID NO: 26004 - protein, 10 aa, Artificial Sequence
  Description of Artificial Sequence: Synthetic peptide
  XENP020884 vhCDR3
DRPDGRAMDY

SEQ ID NO: 26005 - protein, 213 aa, Artificial Sequence; identical to SEQ ID NO: 3160
  Description of Artificial Sequence: Synthetic polypeptide
  XENP020884 9C6_H1.13_L1_anti-BTLA_IgG1_PVA_/S267K Light Chain

SEQ ID NO: 26006 - protein, 106 aa, Artificial Sequence; identical to SEQ ID NO: 3161
  Description of Artificial Sequence: Synthetic polypeptide
  VL of XENP020884

SEQ ID NO: 26007 - protein, 11 aa, Artificial Sequence
  Description of Artificial Sequence: Synthetic peptide
  XENP020884 vlCDR1
KASQSVSNDVA

SEQ ID NO: 26008 - protein, 7 aa, Artificial Sequence
  Description of Artificial Sequence: Synthetic peptide
  XENP020884 vlCDR2
YASNRYT

SEQ ID NO: 26009 - protein, 8 aa, Artificial Sequence
  Description of Artificial Sequence: Synthetic peptide
  XENP020884 vlCDR3
QQDYSSPT

SEQ ID NO: 26010 - protein, 447 aa, Artificial Sequence
  Description of Artificial Sequence: Synthetic polypeptide
  XENP020885 9C6_H1.14_L1_anti-BTLA_IgG1_PVA_/S267K Heavy Chain
QVQLVQSGAEVKKPGASVKVSCKVSGFSLTGYGVNWVRQAPGQGLEWMGMIWIDGSTDYNSKFQGRVTMTKDNSKSTVYMELSSLQTDDTAVYYCARDRPDGRAMDYWGQGTMVTVSSASTKGPSVFPLAPSSKSTSGGTAALGCLVKDYFPEPVTVSWNSGALTSGVHTFPAVLQSSGLYSLSSVVTVPSSSLGTQTYICNVNHKPSNTKVDKKVEPKSCDKTHTCPPCPAPPVAGPSVFLFPPKPKDTLMISRTPEVTCVVVDVKHEDPEVKFNWYVDGVEVHNAKTKPREEQYNSTYRVVSVLTVLHQDWLNGKEYKCKVSNKALPAPIEKTISKAKGQPREPQVYTLPPSREEMTKNQVSLTCLVKGFYPSDIAVEWESNGQPENNYKTTPPVLDSDGSFFLYSKLTVDKSRWQQGNVFSCSVMHEALHNHYTQKSLSLSPGK

SEQ ID NO: 26011 - protein, 118 aa, Artificial Sequence
  Description of Artificial Sequence: Synthetic polypeptide
  VH of XENP020885
QVQLVQSGAEVKKPGASVKVSCKVSGFSLTGYGVNWVRQAPGQGLEWMGMIWIDGSTDYNSKFQGRVTMTKDNSKSTVYMELSSLQTDDTAVYYCARDRPDGRAMDYWGQGTMVTVSS

SEQ ID NO: 26012 - protein, 5 aa, Artificial Sequence
  Description of Artificial Sequence: Synthetic peptide
  XENP020885 vhCDR1
GYGVN

SEQ ID NO: 26013 - protein, 16 aa, Artificial Sequence
  Description of Artificial Sequence: Synthetic peptide
  XENP020885 vhCDR2
MIWIDGSTDYNSKFQG

SEQ ID NO: 26014 - protein, 10 aa, Artificial Sequence
  Description of Artificial Sequence: Synthetic peptide
  XENP020885 vhCDR3
DRPDGRAMDY

SEQ ID NO: 26015 - protein, 213 aa, Artificial Sequence; identical to SEQ ID NO: 3160
  Description of Artificial Sequence: Synthetic polypeptide
  XENP020885 9C6_H1.14_L1_anti-BTLA_IgG1_PVA_/S267K Light Chain

SEQ ID NO: 26016 - protein, 106 aa, Artificial Sequence; identical to SEQ ID NO: 3161
  Description of Artificial Sequence: Synthetic polypeptide
  VL of XENP020885

SEQ ID NO: 26017 - protein, 11 aa, Artificial Sequence
  Description of Artificial Sequence: Synthetic peptide
  XENP020885 vlCDR1
KASQSVSNDVA

SEQ ID NO: 26018 - protein, 7 aa, Artificial Sequence
  Description of Artificial Sequence: Synthetic peptide
  XENP020885 vlCDR2
YASNRYT

SEQ ID NO: 26019 - protein, 8 aa, Artificial Sequence
  Description of Artificial Sequence: Synthetic peptide
  XENP020885 vlCDR3
QQDYSSPT

SEQ ID NO: 26020 - protein, 447 aa, Artificial Sequence
  Description of Artificial Sequence: Synthetic polypeptide
  XENP020886 9C6_H1.15_L1_anti-BTLA_IgG1_PVA_/S267K Heavy Chain
QVQLVQSGAEVKKPGASVKVSCKVSGFSLTGYGVNWVRQAPGQGLEWMGMIWIDGSTDYNSKFQGRVTMTKDNSKSTVYMELSSLRSEDTARYYCARDRPDGRAMDYWGQGTMVTVSSASTKGPSVFPLAPSSKSTSGGTAALGCLVKDYFPEPVTVSWNSGALTSGVHTFPAVLQSSGLYSLSSVVTVPSSSLGTQTYICNVNHKPSNTKVDKKVEPKSCDKTHTCPPCPAPPVAGPSVFLFPPKPKDTLMISRTPEVTCVVVDVKHEDPEVKFNWYVDGVEVHNAKTKPREEQYNSTYRVVSVLTVLHQDWLNGKEYKCKVSNKALPAPIEKTISKAKGQPREPQVYTLPPSREEMTKNQVSLTCLVKGFYPSDIAVEWESNGQPENNYKTTPPVLDSDGSFFLYSKLTVDKSRWQQGNVFSCSVMHEALHNHYTQKSLSLSPGK

SEQ ID NO: 26021 - protein, 118 aa, Artificial Sequence
  Description of Artificial Sequence: Synthetic polypeptide
  VH of XENP020886
QVQLVQSGAEVKKPGASVKVSCKVSGFSLTGYGVNWVRQAPGQGLEWMGMIWIDGSTDYNSKFQGRVTMTKDNSKSTVYMELSSLRSEDTARYYCARDRPDGRAMDYWGQGTMVTVSS

SEQ ID NO: 26022 - protein, 5 aa, Artificial Sequence
  Description of Artificial Sequence: Synthetic peptide
  XENP020886 vhCDR1
GYGVN

SEQ ID NO: 26023 - protein, 16 aa, Artificial Sequence
  Description of Artificial Sequence: Synthetic peptide
  XENP020886 vhCDR2
MIWIDGSTDYNSKFQG

SEQ ID NO: 26024 - protein, 10 aa, Artificial Sequence
  Description of Artificial Sequence: Synthetic peptide
  XENP020886 vhCDR3
DRPDGRAMDY

SEQ ID NO: 26025 - protein, 213 aa, Artificial Sequence; identical to SEQ ID NO: 3160
  Description of Artificial Sequence: Synthetic polypeptide
  XENP020886 9C6_H1.15_L1_anti-BTLA_IgG1_PVA_/S267K Light Chain

SEQ ID NO: 26026 - protein, 106 aa, Artificial Sequence; identical to SEQ ID NO: 3161
  Description of Artificial Sequence: Synthetic polypeptide
  VL of XENP020886

SEQ ID NO: 26027 - protein, 11 aa, Artificial Sequence
  Description of Artificial Sequence: Synthetic peptide
  XENP020886 vlCDR1
KASQSVSNDVA

SEQ ID NO: 26028 - protein, 7 aa, Artificial Sequence
  Description of Artificial Sequence: Synthetic peptide
  XENP020886 vlCDR2
YASNRYT

SEQ ID NO: 26029 - protein, 8 aa, Artificial Sequence
  Description of Artificial Sequence: Synthetic peptide
  XENP020886 vlCDR3
QQDYSSPT

SEQ ID NO: 26030 - protein, 447 aa, Artificial Sequence
  Description of Artificial Sequence: Synthetic polypeptide
  XENP020887 9C6_H1.16_L1_anti-BTLA_IgG1_PVA_/S267K Heavy Chain
QVQLVQSGAEVKKPGASVKVSCKVSGFSLTGYGVNWVRQAPGQGLEWMGMIWIDGSTDYNSKFQGRVTMTKDNSKSTVYMELSSLRSEDTAVYYCARDRPDGRAMDYWGQGTSVTVSSASTKGPSVFPLAPSSKSTSGGTAALGCLVKDYFPEPVTVSWNSGALTSGVHTFPAVLQSSGLYSLSSVVTVPSSSLGTQTYICNVNHKPSNTKVDKKVEPKSCDKTHTCPPCPAPPVAGPSVFLFPPKPKDTLMISRTPEVTCVVVDVKHEDPEVKFNWYVDGVEVHNAKTKPREEQYNSTYRVVSVLTVLHQDWLNGKEYKCKVSNKALPAPIEKTISKAKGQPREPQVYTLPPSREEMTKNQVSLTCLVKGFYPSDIAVEWESNGQPENNYKTTPPVLDSDGSFFLYSKLTVDKSRWQQGNVFSCSVMHEALHNHYTQKSLSLSPGK

SEQ ID NO: 26031 - protein, 118 aa, Artificial Sequence
  Description of Artificial Sequence: Synthetic polypeptide
  VH of XENP020887
QVQLVQSGAEVKKPGASVKVSCKVSGFSLTGYGVNWVRQAPGQGLEWMGMIWIDGSTDYNSKFQGRVTMTKDNSKSTVYMELSSLRSEDTAVYYCARDRPDGRAMDYWGQGTSVTVSS

SEQ ID NO: 26032 - protein, 5 aa, Artificial Sequence
  Description of Artificial Sequence: Synthetic peptide
  XENP020887 vhCDR1
GYGVN

SEQ ID NO: 26033 - protein, 16 aa, Artificial Sequence
  Description of Artificial Sequence: Synthetic peptide
  XENP020887 vhCDR2
MIWIDGSTDYNSKFQG

SEQ ID NO: 26034 - protein, 10 aa, Artificial Sequence
  Description of Artificial Sequence: Synthetic peptide
  XENP020887 vhCDR3
DRPDGRAMDY

SEQ ID NO: 26035 - protein, 213 aa, Artificial Sequence; identical to SEQ ID NO: 3160
  Description of Artificial Sequence: Synthetic polypeptide
  XENP020887 9C6_H1.16_L1_anti-BTLA_IgG1_PVA_/S267K Light Chain

SEQ ID NO: 26036 - protein, 106 aa, Artificial Sequence; identical to SEQ ID NO: 3161
  Description of Artificial Sequence: Synthetic polypeptide
  VL of XENP020887

SEQ ID NO: 26037 - protein, 11 aa, Artificial Sequence
  Description of Artificial Sequence: Synthetic peptide
  XENP020887 vlCDR1
KASQSVSNDVA

SEQ ID NO: 26038 - protein, 7 aa, Artificial Sequence
  Description of Artificial Sequence: Synthetic peptide
  XENP020887 vlCDR2
YASNRYT

SEQ ID NO: 26039 - protein, 8 aa, Artificial Sequence
  Description of Artificial Sequence: Synthetic peptide
  XENP020887 vlCDR3
QQDYSSPT

SEQ ID NO: 26040 - protein, 447 aa, Artificial Sequence; identical to SEQ ID NO: 25741
  Description of Artificial Sequence: Synthetic polypeptide
  XENP020888 9C6_H1_L1.1_anti-BTLA_IgG1_PVA_/S267K Heavy Chain

SEQ ID NO: 26041 - protein, 118 aa, Artificial Sequence; identical to SEQ ID NO: 25742
  Description of Artificial Sequence: Synthetic polypeptide
  VH of XENP020888

SEQ ID NO: 26042 - protein, 5 aa, Artificial Sequence
  Description of Artificial Sequence: Synthetic peptide
  XENP020888 vhCDR1
GYGVN

SEQ ID NO: 26043 - protein, 16 aa, Artificial Sequence
  Description of Artificial Sequence: Synthetic peptide
  XENP020888 vhCDR2
MIWIDGSTDYNSKFQG

SEQ ID NO: 26044 - protein, 10 aa, Artificial Sequence
  Description of Artificial Sequence: Synthetic peptide
  XENP020888 vhCDR3
DRPDGRAMDY

SEQ ID NO: 26045 - protein, 213 aa, Artificial Sequence
  Description of Artificial Sequence: Synthetic polypeptide
  XENP020888 9C6_H1_L1.1_anti-BTLA_IgG1_PVA_/S267K Light Chain
SIVMTQTPDSLAVSLGERATINCKASQSVSNDVAWYQQKPGQSPKLLIYYASNRYTGVPDRFTGSGYGTDFTLTISSLQAEDVAVYFCQQDYSSPTFGGGTKLEIKRTVAAPSVFIFPPSDEQLKSGTASVVCLLNNFYPREAKVQWKVDNALQSGNSQESVTEQDSKDSTYSLSSTLTLSKADYEKHKVYACEVTHQGLSSPVTKSFNRGEC

SEQ ID NO: 26046 - protein, 106 aa, Artificial Sequence
  Description of Artificial Sequence: Synthetic polypeptide
  VL of XENP020888
SIVMTQTPDSLAVSLGERATINCKASQSVSNDVAWYQQKPGQSPKLLIYYASNRYTGVPDRFTGSGYGTDFTLTISSLQAEDVAVYFCQQDYSSPTFGGGTKLEIK

SEQ ID NO: 26047 - protein, 11 aa, Artificial Sequence
  Description of Artificial Sequence: Synthetic peptide
  XENP020888 vlCDR1
KASQSVSNDVA

SEQ ID NO: 26048 - protein, 7 aa, Artificial Sequence
  Description of Artificial Sequence: Synthetic peptide
  XENP020888 vlCDR2
YASNRYT

SEQ ID NO: 26049 - protein, 8 aa, Artificial Sequence
  Description of Artificial Sequence: Synthetic peptide
  XENP020888 vlCDR3
QQDYSSPT

SEQ ID NO: 26050 - protein, 447 aa, Artificial Sequence; identical to SEQ ID NO: 25741
  Description of Artificial Sequence: Synthetic polypeptide
  XENP020889 9C6_H1_L1.2_anti-BTLA_IgG1_PVA_/S267K Heavy Chain

SEQ ID NO: 26051 - protein, 118 aa, Artificial Sequence; identical to SEQ ID NO: 25742
  Description of Artificial Sequence: Synthetic polypeptide
  VH of XENP020889

SEQ ID NO: 26052 - protein, 5 aa, Artificial Sequence
  Description of Artificial Sequence: Synthetic peptide
  XENP020889 vhCDR1
GYGVN

SEQ ID NO: 26053 - protein, 16 aa, Artificial Sequence
  Description of Artificial Sequence: Synthetic peptide
  XENP020889 vhCDR2
MIWIDGSTDYNSKFQG

SEQ ID NO: 26054 - protein, 10 aa, Artificial Sequence
  Description of Artificial Sequence: Synthetic peptide
  XENP020889 vhCDR3
DRPDGRAMDY

SEQ ID NO: 26055 - protein, 213 aa, Artificial Sequence
  Description of Artificial Sequence: Synthetic polypeptide
  XENP020889 9C6_H1_L1.2_anti-BTLA_IgG1_PVA_/S267K Light Chain
SIVMTQTPKFLLVSLGERATINCKASQSVSNDVAWYQQKPGQSPKLLIYYASNRYTGVPDRFTGSGYGTDFTLTISSLQAEDVAVYFCQQDYSSPTFGGGTKLEIKRTVAAPSVFIFPPSDEQLKSGTASVVCLLNNFYPREAKVQWKVDNALQSGNSQESVTEQDSKDSTYSLSSTLTLSKADYEKHKVYACEVTHQGLSSPVTKSFNRGEC

SEQ ID NO: 26056 - protein, 106 aa, Artificial Sequence
  Description of Artificial Sequence: Synthetic polypeptide
  VL of XENP020889
SIVMTQTPKFLLVSLGERATINCKASQSVSNDVAWYQQKPGQSPKLLIYYASNRYTGVPDRFTGSGYGTDFTLTISSLQAEDVAVYFCQQDYSSPTFGGGTKLEIK

SEQ ID NO: 26057 - protein, 11 aa, Artificial Sequence
  Description of Artificial Sequence: Synthetic peptide
  XENP020889 vlCDR1
KASQSVSNDVA

SEQ ID NO: 26058 - protein, 7 aa, Artificial Sequence
  Description of Artificial Sequence: Synthetic peptide
  XENP020889 vlCDR2
YASNRYT

SEQ ID NO: 26059 - protein, 8 aa, Artificial Sequence
  Description of Artificial Sequence: Synthetic peptide
  XENP020889 vlCDR3
QQDYSSPT

SEQ ID NO: 26060 - protein, 447 aa, Artificial Sequence; identical to SEQ ID NO: 25741
  Description of Artificial Sequence: Synthetic polypeptide
  XENP020890 9C6_H1_L1.3_anti-BTLA_IgG1_PVA_/S267K Heavy Chain

SEQ ID NO: 26061 - protein, 118 aa, Artificial Sequence; identical to SEQ ID NO: 25742
  Description of Artificial Sequence: Synthetic polypeptide
  VH of XENP020890

SEQ ID NO: 26062 - protein, 5 aa, Artificial Sequence
  Description of Artificial Sequence: Synthetic peptide
  XENP020890 vhCDR1
GYGVN

SEQ ID NO: 26063 - protein, 16 aa, Artificial Sequence
  Description of Artificial Sequence: Synthetic peptide
  XENP020890 vhCDR2
MIWIDGSTDYNSKFQG

SEQ ID NO: 26064 - protein, 10 aa, Artificial Sequence
  Description of Artificial Sequence: Synthetic peptide
  XENP020890 vhCDR3
DRPDGRAMDY

SEQ ID NO: 26065 - protein, 213 aa, Artificial Sequence
  Description of Artificial Sequence: Synthetic polypeptide
  XENP020890 9C6_H1_L1.3_anti-BTLA_IgG1_PVA_/S267K Light Chain
SIVMTQSPDSLAVSAGDRVTINCKASQSVSNDVAWYQQKPGQSPKLLIYYASNRYTGVPDRFTGSGYGTDFTLTISSLQAEDVAVYFCQQDYSSPTFGGGTKLEIKRTVAAPSVFIFPPSDEQLKSGTASVVCLLNNFYPREAKVQWKVDNALQSGNSQESVTEQDSKDSTYSLSSTLTLSKADYEKHKVYACEVTHQGLSSPVTKSFNRGEC

SEQ ID NO: 26066 - protein, 106 aa, Artificial Sequence
  Description of Artificial Sequence: Synthetic polypeptide
  VL of XENP020890
SIVMTQSPDSLAVSAGDRVTINCKASQSVSNDVAWYQQKPGQSPKLLIYYASNRYTGVPDRFTGSGYGTDFTLTISSLQAEDVAVYFCQQDYSSPTFGGGTKLEIK

SEQ ID NO: 26067 - protein, 11 aa, Artificial Sequence
  Description of Artificial Sequence: Synthetic peptide
  XENP020890 vlCDR1
KASQSVSNDVA

SEQ ID NO: 26068 - protein, 7 aa, Artificial Sequence
  Description of Artificial Sequence: Synthetic peptide
  XENP020890 vlCDR2
YASNRYT

SEQ ID NO: 26069 - protein, 8 aa, Artificial Sequence
  Description of Artificial Sequence: Synthetic peptide
  XENP020890 vlCDR3
QQDYSSPT

SEQ ID NO: 26070 - protein, 447 aa, Artificial Sequence; identical to SEQ ID NO: 25741
  Description of Artificial Sequence: Synthetic polypeptide
  XENP020891 9C6_H1_L1.4_anti-BTLA_IgG1_PVA_/S267K Heavy Chain

SEQ ID NO: 26071 - protein, 118 aa, Artificial Sequence; identical to SEQ ID NO: 25742
  Description of Artificial Sequence: Synthetic polypeptide
  VH of XENP020891

SEQ ID NO: 26072 - protein, 5 aa, Artificial Sequence
  Description of Artificial Sequence: Synthetic peptide
  XENP020891 vhCDR1
GYGVN

SEQ ID NO: 26073 - protein, 16 aa, Artificial Sequence
  Description of Artificial Sequence: Synthetic peptide
  XENP020891 vhCDR2
MIWIDGSTDYNSKFQG

SEQ ID NO: 26074 - protein, 10 aa, Artificial Sequence
  Description of Artificial Sequence: Synthetic peptide
  XENP020891 vhCDR3
DRPDGRAMDY

SEQ ID NO: 26075 - protein, 213 aa, Artificial Sequence
  Description of Artificial Sequence: Synthetic polypeptide
  XENP020891 9C6_H1_L1.4_anti-BTLA_IgG1_PVA_/S267K Light Chain
SIVMTQSPDSLAVSLGERATITCKASQSVSNDVAWYQQKPGQSPKLLIYYASNRYTGVPDRFTGSGYGTDFTLTISSLQAEDVAVYFCQQDYSSPTFGGGTKLEIKRTVAAPSVFIFPPSDEQLKSGTASVVCLLNNFYPREAKVQWKVDNALQSGNSQESVTEQDSKDSTYSLSSTLTLSKADYEKHKVYACEVTHQGLSSPVTKSFNRGEC

SEQ ID NO: 26076 - protein, 106 aa, Artificial Sequence
  Description of Artificial Sequence: Synthetic polypeptide
  VL of XENP020891
SIVMTQSPDSLAVSLGERATITCKASQSVSNDVAWYQQKPGQSPKLLIYYASNRYTGVPDRFTGSGYGTDFTLTISSLQAEDVAVYFCQQDYSSPTFGGGTKLEIK

SEQ ID NO: 26077 - protein, 11 aa, Artificial Sequence
  Description of Artificial Sequence: Synthetic peptide
  XENP020891 vlCDR1
KASQSVSNDVA

SEQ ID NO: 26078 - protein, 7 aa, Artificial Sequence
  Description of Artificial Sequence: Synthetic peptide
  XENP020891 vlCDR2
YASNRYT

SEQ ID NO: 26079 - protein, 8 aa, Artificial Sequence
  Description of Artificial Sequence: Synthetic peptide
  XENP020891 vlCDR3
QQDYSSPT

SEQ ID NO: 26080 - protein, 447 aa, Artificial Sequence; identical to SEQ ID NO: 25741
  Description of Artificial Sequence: Synthetic polypeptide
  XENP020892 9C6_H1_L1.5_anti-BTLA_IgG1_PVA_/S267K Heavy Chain

SEQ ID NO: 26081 - protein, 118 aa, Artificial Sequence; identical to SEQ ID NO: 25742
  Description of Artificial Sequence: Synthetic polypeptide
  VH of XENP020892

SEQ ID NO: 26082 - protein, 5 aa, Artificial Sequence
  Description of Artificial Sequence: Synthetic peptide
  XENP020892 vhCDR1
GYGVN

SEQ ID NO: 26083 - protein, 16 aa, Artificial Sequence
  Description of Artificial Sequence: Synthetic peptide
  XENP020892 vhCDR2
MIWIDGSTDYNSKFQG

SEQ ID NO: 26084 - protein, 10 aa, Artificial Sequence
  Description of Artificial Sequence: Synthetic peptide
  XENP020892 vhCDR3
DRPDGRAMDY

SEQ ID NO: 26085 - protein, 213 aa, Artificial Sequence
  Description of Artificial Sequence: Synthetic polypeptide
  XENP020892 9C6_H1_L1.5_anti-BTLA_IgG1_PVA_/S267K Light Chain
SIVMTQSPDSLAVSLGERATINCKASQSVSNDVAWYQQKPGQSPKLLIYYASNRYTGVPDRFTGSGYGTDFTFTISSLQAEDVAVYFCQQDYSSPTFGGGTKLEIKRTVAAPSVFIFPPSDEQLKSGTASVVCLLNNFYPREAKVQWKVDNALQSGNSQESVTEQDSKDSTYSLSSTLTLSKADYEKHKVYACEVTHQGLSSPVTKSFNRGEC

SEQ ID NO: 26086 - protein, 106 aa, Artificial Sequence
  Description of Artificial Sequence: Synthetic polypeptide
  VL of XENP020892
SIVMTQSPDSLAVSLGERATINCKASQSVSNDVAWYQQKPGQSPKLLIYYASNRYTGVPDRFTGSGYGTDFTFTISSLQAEDVAVYFCQQDYSSPTFGGGTKLEIK

SEQ ID NO: 26087 - protein, 11 aa, Artificial Sequence
  Description of Artificial Sequence: Synthetic peptide
  XENP020892 vlCDR1
KASQSVSNDVA

SEQ ID NO: 26088 - protein, 7 aa, Artificial Sequence
  Description of Artificial Sequence: Synthetic peptide
  XENP020892 vlCDR2
YASNRYT

SEQ ID NO: 26089 - protein, 8 aa, Artificial Sequence
  Description of Artificial Sequence: Synthetic peptide
  XENP020892 vlCDR3
QQDYSSPT

SEQ ID NO: 26090 - protein, 447 aa, Artificial Sequence; identical to SEQ ID NO: 25741
  Description of Artificial Sequence: Synthetic polypeptide
  XENP020893 9C6_H1_L1.6_anti-BTLA_IgG1_PVA_/S267K Heavy Chain

SEQ ID NO: 26091 - protein, 118 aa, Artificial Sequence; identical to SEQ ID NO: 25742
  Description of Artificial Sequence: Synthetic polypeptide
  VH of XENP020893

SEQ ID NO: 26092 - protein, 5 aa, Artificial Sequence
  Description of Artificial Sequence: Synthetic peptide
  XENP020893 vhCDR1
GYGVN

SEQ ID NO: 26093 - protein, 16 aa, Artificial Sequence
  Description of Artificial Sequence: Synthetic peptide
  XENP020893 vhCDR2
MIWIDGSTDYNSKFQG

SEQ ID NO: 26094 - protein, 10 aa, Artificial Sequence
  Description of Artificial Sequence: Synthetic peptide
  XENP020893 vhCDR3
DRPDGRAMDY

SEQ ID NO: 26095 - protein, 213 aa, Artificial Sequence
  Description of Artificial Sequence: Synthetic polypeptide
  XENP020893 9C6_H1_L1.6_anti-BTLA_IgG1_PVA_/S267K Light Chain
SIVMTQSPDSLAVSLGERATINCKASQSVSNDVAWYQQKPGQSPKLLIYYASNRYTGVPDRFTGSGYGTDFTLTISTVQAEDVAVYFCQQDYSSPTFGGGTKLEIKRTVAAPSVFIFPPSDEQLKSGTASVVCLLNNFYPREAKVQWKVDNALQSGNSQESVTEQDSKDSTYSLSSTLTLSKADYEKHKVYACEVTHQGLSSPVTKSFNRGEC

SEQ ID NO: 26096 - protein, 106 aa, Artificial Sequence
  Description of Artificial Sequence: Synthetic polypeptide
  VL of XENP020893
SIVMTQSPDSLAVSLGERATINCKASQSVSNDVAWYQQKPGQSPKLLIYYASNRYTGVPDRFTGSGYGTDFTLTISTVQAEDVAVYFCQQDYSSPTFGGGTKLEIK

SEQ ID NO: 26097 - protein, 11 aa, Artificial Sequence
  Description of Artificial Sequence: Synthetic peptide
  XENP020893 vlCDR1
KASQSVSNDVA

SEQ ID NO: 26098 - protein, 7 aa, Artificial Sequence
  Description of Artificial Sequence: Synthetic peptide
  XENP020893 vlCDR2
YASNRYT

SEQ ID NO: 26099 - protein, 8 aa, Artificial Sequence
  Description of Artificial Sequence: Synthetic peptide
  XENP020893 vlCDR3
QQDYSSPT

SEQ ID NO: 26100 - protein, 447 aa, Artificial Sequence; identical to SEQ ID NO: 25741
  Description of Artificial Sequence: Synthetic polypeptide
  XENP020894 9C6_H1_L1.7_anti-BTLA_IgG1_PVA_/S267K Heavy Chain

SEQ ID NO: 26101 - protein, 118 aa, Artificial Sequence; identical to SEQ ID NO: 25742
  Description of Artificial Sequence: Synthetic polypeptide
  VH of XENP020894

SEQ ID NO: 26102 - protein, 5 aa, Artificial Sequence
  Description of Artificial Sequence: Synthetic peptide
  XENP020894 vhCDR1
GYGVN

SEQ ID NO: 26103 - protein, 16 aa, Artificial Sequence
  Description of Artificial Sequence: Synthetic peptide
  XENP020894 vhCDR2
MIWIDGSTDYNSKFQG

SEQ ID NO: 26104 - protein, 10 aa, Artificial Sequence
  Description of Artificial Sequence: Synthetic peptide
  XENP020894 vhCDR3
DRPDGRAMDY

SEQ ID NO: 26105 - protein, 213 aa, Artificial Sequence
  Description of Artificial Sequence: Synthetic polypeptide
  XENP020894 9C6_H1_L1.7_anti-BTLA_IgG1_PVA_/S267K Light Chain
SIVMTQSPDSLAVSLGERATINCKASQSVSNDVAWYQQKPGQSPKLLIYYASNRYTGVPDRFTGSGYGTDFTLTISSLQAEDLAVYFCQQDYSSPTFGGGTKLEIKRTVAAPSVFIFPPSDEQLKSGTASVVCLLNNFYPREAKVQWKVDNALQSGNSQESVTEQDSKDSTYSLSSTLTLSKADYEKHKVYACEVTHQGLSSPVTKSFNRGEC

SEQ ID NO: 26106 - protein, 106 aa, Artificial Sequence
  Description of Artificial Sequence: Synthetic polypeptide
  VL of XENP020894
SIVMTQSPDSLAVSLGERATINCKASQSVSNDVAWYQQKPGQSPKLLIYYASNRYTGVPDRFTGSGYGTDFTLTISSLQAEDLAVYFCQQDYSSPTFGGGTKLEIK

SEQ ID NO: 26107 - protein, 11 aa, Artificial Sequence
  Description of Artificial Sequence: Synthetic peptide
  XENP020894 vlCDR1
KASQSVSNDVA

SEQ ID NO: 26108 - protein, 7 aa, Artificial Sequence
  Description of Artificial Sequence: Synthetic peptide
  XENP020894 vlCDR2
YASNRYT

SEQ ID NO: 26109 - protein, 8 aa, Artificial Sequence
  Description of Artificial Sequence: Synthetic peptide
  XENP020894 vlCDR3
QQDYSSPT

SEQ ID NO: 26110 - protein, 449 aa, Artificial Sequence
  Description of Artificial Sequence: Synthetic polypeptide
  XENP021208 3F6_H1L0_anti-BTLA_IgG1_PVA_/S267K Heavy Chain
QVQLQESGPGLVKPSQTLSLTCTVSGDSITSGYWNWIRKPPGKKLEYIGYLSYSGSTYYNPSLKSRVTISRDTSKNQYSLKLSSVTAADTAVYYCARYFYGSYYEAMDYWGQGTTVTVSSASTKGPSVFPLAPSSKSTSGGTAALGCLVKDYFPEPVTVSWNSGALTSGVHTFPAVLQSSGLYSLSSVVTVPSSSLGTQTYICNVNHKPSNTKVDKKVEPKSCDKTHTCPPCPAPPVAGPSVFLFPPKPKDTLMISRTPEVTCVVVDVKHEDPEVKFNWYVDGVEVHNAKTKPREEQYNSTYRVVSVLTVLHQDWLNGKEYKCKVSNKALPAPIEKTISKAKGQPREPQVYTLPPSREEMTKNQVSLTCLVKGFYPSDIAVEWESNGQPENNYKTTPPVLDSDGSFFLYSKLTVDKSRWQQGNVFSCSVMHEALHNHYTQKSLSLSPGK

SEQ ID NO: 26111 - protein, 120 aa, Artificial Sequence
  Description of Artificial Sequence: Synthetic polypeptide
  VH of XENP021208
QVQLQESGPGLVKPSQTLSLTCTVSGDSITSGYWNWIRKPPGKKLEYIGYLSYSGSTYYNPSLKSRVTISRDTSKNQYSLKLSSVTAADTAVYYCARYFYGSYYEAMDYWGQGTTVTVSS

SEQ ID NO: 26112 - protein, 5 aa, Artificial Sequence
  Description of Artificial Sequence: Synthetic peptide
  XENP021208 vhCDR1
SGYWN

SEQ ID NO: 26113 - protein, 16 aa, Artificial Sequence
  Description of Artificial Sequence: Synthetic peptide
  XENP021208 vhCDR2
YLSYSGSTYYNPSLKS

SEQ ID NO: 26114 - protein, 12 aa, Artificial Sequence
  Description of Artificial Sequence: Synthetic peptide
  XENP021208 vhCDR3
YFYGSYYEAMDY

SEQ ID NO: 26115 - protein, 214 aa, Artificial Sequence; identical to SEQ ID NO: 25596
  Description of Artificial Sequence: Synthetic polypeptide
  XENP021208 3F6_H1L0_anti-BTLA_IgG1_PVA_/S267K Light Chain

SEQ ID NO: 26116 - protein, 107 aa, Artificial Sequence; identical to SEQ ID NO: 25597
  Description of Artificial Sequence: Synthetic polypeptide
  VL of XENP021208

SEQ ID NO: 26117 - protein, 11 aa, Artificial Sequence
  Description of Artificial Sequence: Synthetic peptide
  XENP021208 vlCDR1
RASKSISKYLA

SEQ ID NO: 26118 - protein, 7 aa, Artificial Sequence
  Description of Artificial Sequence: Synthetic peptide
  XENP021208 vlCDR2
SGSTLQS

SEQ ID NO: 26119 - protein, 9 aa, Artificial Sequence
  Description of Artificial Sequence: Synthetic peptide
  XENP021208 vlCDR3
QQHNEYPWT

SEQ ID NO: 26120 - protein, 449 aa, Artificial Sequence; identical to SEQ ID NO: 26110
  Description of Artificial Sequence: Synthetic polypeptide
  XENP021209 3F6_H1L1_anti-BTLA_IgG1_PVA_/S267K Heavy Chain

SEQ ID NO: 26121 - protein, 120 aa, Artificial Sequence; identical to SEQ ID NO: 26111
  Description of Artificial Sequence: Synthetic polypeptide
  VH of XENP021209

SEQ ID NO: 26122 - protein, 5 aa, Artificial Sequence
  Description of Artificial Sequence: Synthetic peptide
  XENP021209 vhCDR1
SGYWN

SEQ ID NO: 26123 - protein, 16 aa, Artificial Sequence
  Description of Artificial Sequence: Synthetic peptide
  XENP021209 vhCDR2
YLSYSGSTYYNPSLKS

SEQ ID NO: 26124 - protein, 12 aa, Artificial Sequence
  Description of Artificial Sequence: Synthetic peptide
  XENP021209 vhCDR3
YFYGSYYEAMDY

SEQ ID NO: 26125 - protein, 214 aa, Artificial Sequence
  Description of Artificial Sequence: Synthetic polypeptide
  XENP021209 3F6_H1L1_anti-BTLA_IgG1_PVA_/S267K Light Chain
DVQITQSPSFLSASVGDRVTITCRASKSISKYLAWYQEKPGKTNKLLIYSGSTLQSGIPSRFSGSGSGTEFTLTISSLQPEDFATYYCQQHNEYPWTFGGGTKVEIKRTVAAPSVFIFPPSDEQLKSGTASVVCLLNNFYPREAKVQWKVDNALQSGNSQESVTEQDSKDSTYSLSSTLTLSKADYEKHKVYACEVTHQGLSSPVTKSFNRGEC

SEQ ID NO: 26126 - protein, 107 aa, Artificial Sequence
  Description of Artificial Sequence: Synthetic polypeptide
  VL of XENP021209
DVQITQSPSFLSASVGDRVTITCRASKSISKYLAWYQEKPGKTNKLLIYSGSTLQSGIPSRFSGSGSGTEFTLTISSLQPEDFATYYCQQHNEYPWTFGGGTKVEIK

SEQ ID NO: 26127 - protein, 11 aa, Artificial Sequence
  Description of Artificial Sequence: Synthetic peptide
  XENP021209 vlCDR1
RASKSISKYLA

SEQ ID NO: 26128 - protein, 7 aa, Artificial Sequence
  Description of Artificial Sequence: Synthetic peptide
  XENP021209 vlCDR2
SGSTLQS

SEQ ID NO: 26129 - protein, 9 aa, Artificial Sequence
  Description of Artificial Sequence: Synthetic peptide
  XENP021209 vlCDR3
QQHNEYPWT

SEQ ID NO: 26130 - protein, 448 aa, Artificial Sequence; identical to SEQ ID NO: 25601
  Description of Artificial Sequence: Synthetic polypeptide
  XENP021210 1A9_H0L1_anti-BTLA_IgG1_PVA_/S267K Heavy Chain

SEQ ID NO: 26131 - protein, 119 aa, Artificial Sequence; identical to SEQ ID NO: 25602
  Description of Artificial Sequence: Synthetic polypeptide
  VH of XENP021210

SEQ ID NO: 26132 - protein, 5 aa, Artificial Sequence
  Description of Artificial Sequence: Synthetic peptide
  XENP021210 vhCDR1
SFGMH

SEQ ID NO: 26133 - protein, 17 aa, Artificial Sequence
  Description of Artificial Sequence: Synthetic peptide
  XENP021210 vhCDR2
YISSGISTIYYADTVKG

SEQ ID NO: 26134 - protein, 10 aa, Artificial Sequence
  Description of Artificial Sequence: Synthetic peptide
  XENP021210 vhCDR3
DWLRGYAMDY

SEQ ID NO: 26135 - protein, 218 aa, Artificial Sequence
  Description of Artificial Sequence: Synthetic polypeptide
  XENP021210 1A9_H0L1_anti-BTLA_IgG1_PVA_/S267K Light Chain
DIVLTQSPSSLSASVGDRVTITCRASQSIDYDGDSYMNWYQQKPGKPPKLLIYAASNLDFGIPARFSGSGSGTDFTLTISSLQPEDFATYYCQQSNEDPWTFGGGTKVEIKRTVAAPSVFIFPPSDEQLKSGTASVVCLLNNFYPREAKVQWKVDNALQSGNSQESVTEQDSKDSTYSLSSTLTLSKADYEKHKVYACEVTHQGLSSPVTKSFNRGEC

SEQ ID NO: 26136 - protein, 111 aa, Artificial Sequence
  Description of Artificial Sequence: Synthetic polypeptide
  VL of XENP021210
DIVLTQSPSSLSASVGDRVTITCRASQSIDYDGDSYMNWYQQKPGKPPKLLIYAASNLDFGIPARFSGSGSGTDFTLTISSLQPEDFATYYCQQSNEDPWTFGGGTKVEIK

SEQ ID NO: 26137 - protein, 15 aa, Artificial Sequence
  Description of Artificial Sequence: Synthetic peptide
  XENP021210 vlCDR1
RASQSIDYDGDSYMN

SEQ ID NO: 26138 - protein, 7 aa, Artificial Sequence
  Description of Artificial Sequence: Synthetic peptide
  XENP021210 vlCDR2
AASNLDF

SEQ ID NO: 26139 - protein, 9 aa, Artificial Sequence
  Description of Artificial Sequence: Synthetic peptide
  XENP021210 vlCDR3
QQSNEDPWT

SEQ ID NO: 26140 - protein, 448 aa, Artificial Sequence
  Description of Artificial Sequence: Synthetic polypeptide
  XENP021211 1A9_H1L0_anti-BTLA_IgG1_PVA_/S267K Heavy Chain
EVQLVESGGGLVQPGGSLRLSCAASGFTFSSFGMHWVRQAPGKGLEWVSYISSGISTIYYADSVKGRFTISRDNSKNTLYLQMNSLRAEDTAVYYCARDWLRGYAMDYWGQGTTVTVSSASTKGPSVFPLAPSSKSTSGGTAALGCLVKDYFPEPVTVSWNSGALTSGVHTFPAVLQSSGLYSLSSVVTVPSSSLGTQTYICNVNHKPSNTKVDKKVEPKSCDKTHTCPPCPAPPVAGPSVFLFPPKPKDTLMISRTPEVTCVVVDVKHEDPEVKFNWYVDGVEVHNAKTKPREEQYNSTYRVVSVLTVLHQDWLNGKEYKCKVSNKALPAPIEKTISKAKGQPREPQVYTLPPSREEMTKNQVSLTCLVKGFYPSDIAVEWESNGQPENNYKTTPPVLDSDGSFFLYSKLTVDKSRWQQGNVFSCSVMHEALHNHYTQKSLSLSPGK

SEQ ID NO: 26141 - protein, 119 aa, Artificial Sequence
  Description of Artificial Sequence: Synthetic polypeptide
  VH of XENP021211
EVQLVESGGGLVQPGGSLRLSCAASGFTFSSFGMHWVRQAPGKGLEWVSYISSGISTIYYADSVKGRFTISRDNSKNTLYLQMNSLRAEDTAVYYCARDWLRGYAMDYWGQGTTVTVSS

SEQ ID NO: 26142 - protein, 5 aa, Artificial Sequence
  Description of Artificial Sequence: Synthetic peptide
  XENP021211 vhCDR1
SFGMH

SEQ ID NO: 26143 - protein, 17 aa, Artificial Sequence
  Description of Artificial Sequence: Synthetic peptide
  XENP021211 vhCDR2
YISSGISTIYYADSVKG

SEQ ID NO: 26144 - protein, 10 aa, Artificial Sequence
  Description of Artificial Sequence: Synthetic peptide
  XENP021211 vhCDR3
DWLRGYAMDY

SEQ ID NO: 26145 - protein, 218 aa, Artificial Sequence; identical to SEQ ID NO: 25606
  Description of Artificial Sequence: Synthetic polypeptide
  XENP021211 1A9_H1L0_anti-BTLA_IgG1_PVA_/S267K Light Chain

SEQ ID NO: 26146 - protein, 111 aa, Artificial Sequence; identical to SEQ ID NO: 25607
  Description of Artificial Sequence: Synthetic polypeptide
  VL of XENP021211

SEQ ID NO: 26147 - protein, 15 aa, Artificial Sequence
  Description of Artificial Sequence: Synthetic peptide
  XENP021211 vlCDR1
KASQSIDYDGDSYMN

SEQ ID NO: 26148 - protein, 7 aa, Artificial Sequence
  Description of Artificial Sequence: Synthetic peptide
  XENP021211 vlCDR2
AASNLDF

SEQ ID NO: 26149 - protein, 9 aa, Artificial Sequence
  Description of Artificial Sequence: Synthetic peptide
  XENP021211 vlCDR3
QQSNEDPWT

SEQ ID NO: 26150 - protein, 448 aa, Artificial Sequence; identical to SEQ ID NO: 26140
  Description of Artificial Sequence: Synthetic polypeptide
  XENP021212 1A9_H1L1_anti-BTLA_IgG1_PVA_/S267K Heavy Chain

SEQ ID NO: 26151 - protein, 119 aa, Artificial Sequence; identical to SEQ ID NO: 26141
  Description of Artificial Sequence: Synthetic polypeptide
  VH of XENP021212

SEQ ID NO: 26152 - protein, 5 aa, Artificial Sequence
  Description of Artificial Sequence: Synthetic peptide
  XENP021212 vhCDR1
SFGMH

SEQ ID NO: 26153 - protein, 17 aa, Artificial Sequence
  Description of Artificial Sequence: Synthetic peptide
  XENP021212 vhCDR2
YISSGISTIYYADSVKG

SEQ ID NO: 26154 - protein, 10 aa, Artificial Sequence
  Description of Artificial Sequence: Synthetic peptide
  XENP021212 vhCDR3
DWLRGYAMDY

SEQ ID NO: 26155 - protein, 218 aa, Artificial Sequence; identical to SEQ ID NO: 26135
  Description of Artificial Sequence: Synthetic polypeptide
  XENP021212 1A9_H1L1_anti-BTLA_IgG1_PVA_/S267K Light Chain

SEQ ID NO: 26156 - protein, 111 aa, Artificial Sequence; identical to SEQ ID NO: 26136
  Description of Artificial Sequence: Synthetic polypeptide
  VL of XENP021212

SEQ ID NO: 26157 - protein, 15 aa, Artificial Sequence
  Description of Artificial Sequence: Synthetic peptide
  XENP021212 vlCDR1
RASQSIDYDGDSYMN

SEQ ID NO: 26158 - protein, 7 aa, Artificial Sequence
  Description of Artificial Sequence: Synthetic peptide
  XENP021212 vlCDR2
AASNLDF

SEQ ID NO: 26159 - protein, 9 aa, Artificial Sequence
  Description of Artificial Sequence: Synthetic peptide
  XENP021212 vlCDR3
QQSNEDPWT

SEQ ID NO: 26160 - protein, 448 aa, Artificial Sequence; identical to SEQ ID NO: 26140
  Description of Artificial Sequence: Synthetic polypeptide
  XENP021213 1A9_H1L2_anti-BTLA_IgG1_PVA_/S267K Heavy Chain

SEQ ID NO: 26161 - protein, 119 aa, Artificial Sequence; identical to SEQ ID NO: 26141
  Description of Artificial Sequence: Synthetic polypeptide
  VH of XENP021213

SEQ ID NO: 26162 - protein, 5 aa, Artificial Sequence
  Description of Artificial Sequence: Synthetic peptide
  XENP021213 vhCDR1
SFGMH

SEQ ID NO: 26163 - protein, 17 aa, Artificial Sequence
  Description of Artificial Sequence: Synthetic peptide
  XENP021213 vhCDR2
YISSGISTIYYADSVKG

SEQ ID NO: 26164 - protein, 10 aa, Artificial Sequence
  Description of Artificial Sequence: Synthetic peptide
  XENP021213 vhCDR3
DWLRGYAMDY

SEQ ID NO: 26165 - protein, 218 aa, Artificial Sequence
  Description of Artificial Sequence: Synthetic polypeptide
  XENP021213 1A9_H1L2_anti-BTLA_IgG1_PVA_/S267K Light Chain
DIVLTQSPATLSVSPGERATLSCRASQSIDYDGDSYMNWYQQKPGQPPRLLIYAASNLDFGIPARFSGSGSGTEFTLTISSLQSEDFAVYYCQQSNEDPWTFGGGTKVEIKRTVAAPSVFIFPPSDEQLKSGTASVVCLLNNFYPREAKVQWKVDNALQSGNSQESVTEQDSKDSTYSLSSTLTLSKADYEKHKVYACEVTHQGLSSPVTKSFNRGEC

SEQ ID NO: 26166 - protein, 111 aa, Artificial Sequence
  Description of Artificial Sequence: Synthetic polypeptide
  VL of XENP021213
DIVLTQSPATLSVSPGERATLSCRASQSIDYDGDSYMNWYQQKPGQPPRLLIYAASNLDFGIPARFSGSGSGTEFTLTISSLQSEDFAVYYCQQSNEDPWTFGGGTKVEIK

SEQ ID NO: 26167 - protein, 15 aa, Artificial Sequence
  Description of Artificial Sequence: Synthetic peptide
  XENP021213 vlCDR1
RASQSIDYDGDSYMN

SEQ ID NO: 26168 - protein, 7 aa, Artificial Sequence
  Description of Artificial Sequence: Synthetic peptide
  XENP021213 vlCDR2
AASNLDF

SEQ ID NO: 26169 - protein, 9 aa, Artificial Sequence
  Description of Artificial Sequence: Synthetic peptide
  XENP021213 vlCDR3
QQSNEDPWT

SEQ ID NO: 26170 - protein, 448 aa, Artificial Sequence
  Description of Artificial Sequence: Synthetic polypeptide
  XENP021214 1A9_H2L1_anti-BTLA_IgG1_PVA_/S267K Heavy Chain
QVQLVQSGAEVKKPGASVKVSCKASGFTFSSFGMHWVRQAPGQGLEWMGYISSGISTIYYADKFQGRVTMTRDNSKNTLYMELSSLRSEDTAVYYCARDWLRGYAMDYWGQGTTVTVSSASTKGPSVFPLAPSSKSTSGGTAALGCLVKDYFPEPVTVSWNSGALTSGVHTFPAVLQSSGLYSLSSVVTVPSSSLGTQTYICNVNHKPSNTKVDKKVEPKSCDKTHTCPPCPAPPVAGPSVFLFPPKPKDTLMISRTPEVTCVVVDVKHEDPEVKFNWYVDGVEVHNAKTKPREEQYNSTYRVVSVLTVLHQDWLNGKEYKCKVSNKALPAPIEKTISKAKGQPREPQVYTLPPSREEMTKNQVSLTCLVKGFYPSDIAVEWESNGQPENNYKTTPPVLDSDGSFFLYSKLTVDKSRWQQGNVFSCSVMHEALHNHYTQKSLSLSPGK

SEQ ID NO: 26171 - protein, 119 aa, Artificial Sequence
  Description of Artificial Sequence: Synthetic polypeptide
  VH of XENP021214
QVQLVQSGAEVKKPGASVKVSCKASGFTFSSFGMHWVRQAPGQGLEWMGYISSGISTIYYADKFQGRVTMTRDNSKNTLYMELSSLRSEDTAVYYCARDWLRGYAMDYWGQGTTVTVSS

SEQ ID NO: 26172 - protein, 5 aa, Artificial Sequence
  Description of Artificial Sequence: Synthetic peptide
  XENP021214 vhCDR1
SFGMH

SEQ ID NO: 26173 - protein, 17 aa, Artificial Sequence
  Description of Artificial Sequence: Synthetic peptide
  XENP021214 vhCDR2
YISSGISTIYYADKFQG

SEQ ID NO: 26174 - protein, 10 aa, Artificial Sequence
  Description of Artificial Sequence: Synthetic peptide
  XENP021214 vhCDR3
DWLRGYAMDY

SEQ ID NO: 26175 - protein, 218 aa, Artificial Sequence; identical to SEQ ID NO: 26135
  Description of Artificial Sequence: Synthetic polypeptide
  XENP021214 1A9_H2L1_anti-BTLA_IgG1_PVA_/S267K Light Chain

SEQ ID NO: 26176 - protein, 111 aa, Artificial Sequence; identical to SEQ ID NO: 26136
  Description of Artificial Sequence: Synthetic polypeptide
  VL of XENP021214

SEQ ID NO: 26177 - protein, 15 aa, Artificial Sequence
  Description of Artificial Sequence: Synthetic peptide
  XENP021214 vlCDR1
RASQSIDYDGDSYMN

SEQ ID NO: 26178 - protein, 7 aa, Artificial Sequence
  Description of Artificial Sequence: Synthetic peptide
  XENP021214 vlCDR2
AASNLDF

SEQ ID NO: 26179 - protein, 9 aa, Artificial Sequence
  Description of Artificial Sequence: Synthetic peptide
  XENP021214 vlCDR3
QQSNEDPWT

SEQ ID NO: 26180 - protein, 448 aa, Artificial Sequence
  Description of Artificial Sequence: Synthetic polypeptide
  XENP019351 10A7_H0L0_IgG1_PVA_/S267K Heavy Chain
EVQLVESGGGLTQPGKSLKLSCEASGFTFSSFTMHWVRQSPGKGLEWVAFIRSGSGIVFYADAVRGRFTISRDNAKNLLFLQMNDLKSEDTAMYYCARRPLGHNTFDSWGQGTLVTVSSASTKGPSVFPLAPSSKSTSGGTAALGCLVKDYFPEPVTVSWNSGALTSGVHTFPAVLQSSGLYSLSSVVTVPSSSLGTQTYICNVNHKPSNTKVDKKVEPKSCDKTHTCPPCPAPPVAGPSVFLFPPKPKDTLMISRTPEVTCVVVDVKHEDPEVKFNWYVDGVEVHNAKTKPREEQYNSTYRVVSVLTVLHQDWLNGKEYKCKVSNKALPAPIEKTISKAKGQPREPQVYTLPPSREEMTKNQVSLTCLVKGFYPSDIAVEWESNGQPENNYKTTPPVLDSDGSFFLYSKLTVDKSRWQQGNVFSCSVMHEALHNHYTQKSLSLSPGK

SEQ ID NO: 26181 - protein, 119 aa, Artificial Sequence; identical to SEQ ID NO: 4433
  Description of Artificial Sequence: Synthetic polypeptide
  VH of XENP019351

SEQ ID NO: 26182 - protein, 5 aa, Artificial Sequence
  Description of Artificial Sequence: Synthetic peptide
  XENP019351 vhCDR1
SFTMH

SEQ ID NO: 26183 - protein, 17 aa, Artificial Sequence
  Description of Artificial Sequence: Synthetic peptide
  XENP019351 vhCDR2
FIRSGSGIVFYADAVRG

SEQ ID NO: 26184 - protein, 10 aa, Artificial Sequence
  Description of Artificial Sequence: Synthetic peptide
  XENP019351 vhCDR3
RPLGHNTFDS

SEQ ID NO: 26185 - protein, 220 aa, Artificial Sequence
  Description of Artificial Sequence: Synthetic polypeptide
  XENP019351 10A7_H0L0_IgG1_PVA_/S267K Light Chain
DIVMTQSPSSLAVSPGEKVTMTCKSSQSLYYSGVKENLLAWYQQKPGQSPKLLIYYASIRFTGVPDRFTGSGSGTDYTLTITSVQAEDMGQYFCQQGINNPLTFGDGTKLEIKRTVAAPSVFIFPPSDEQLKSGTASVVCLLNNFYPREAKVQWKVDNALQSGNSQESVTEQDSKDSTYSLSSTLTLSKADYEKHKVYACEVTHQGLSSPVTKSFNRGEC

SEQ ID NO: 26186 - protein, 113 aa, Artificial Sequence; identical to SEQ ID NO: 4437
  Description of Artificial Sequence: Synthetic polypeptide
  VL of XENP019351

SEQ ID NO: 26187 - protein, 17 aa, Artificial Sequence
  Description of Artificial Sequence: Synthetic peptide
  XENP019351 vlCDR1
KSSQSLYYSGVKENLLA

SEQ ID NO: 26188 - protein, 7 aa, Artificial Sequence
  Description of Artificial Sequence: Synthetic peptide
  XENP019351 vlCDR2
YASIRFT

SEQ ID NO: 26189 - protein, 9 aa, Artificial Sequence
  Description of Artificial Sequence: Synthetic peptide
  XENP019351 vlCDR3
QQGINNPLT

SEQ ID NO: 26190 - protein, 448 aa, Artificial Sequence
  Description of Artificial Sequence: Synthetic polypeptide
  XENP019352 1F4_H0L0_IgG1_PVA_/S267K Heavy Chain
EVQLQQSGPELVKPGTSMKISCKASGYSFTGHLMNWVKQSHGKNLEWIGLIIPYNGGTSYNQKFKGKATLTVDKSSSTAYMELLSLTSDDSAVYFCSRGLRGFYAMDYWGQGTSVTVSSASTKGPSVFPLAPSSKSTSGGTAALGCLVKDYFPEPVTVSWNSGALTSGVHTFPAVLQSSGLYSLSSVVTVPSSSLGTQTYICNVNHKPSNTKVDKKVEPKSCDKTHTCPPCPAPPVAGPSVFLFPPKPKDTLMISRTPEVTCVVVDVKHEDPEVKFNWYVDGVEVHNAKTKPREEQYNSTYRVVSVLTVLHQDWLNGKEYKCKVSNKALPAPIEKTISKAKGQPREPQVYTLPPSREEMTKNQVSLTCLVKGFYPSDIAVEWESNGQPENNYKTTPPVLDSDGSFFLYSKLTVDKSRWQQGNVFSCSVMHEALHNHYTQKSLSLSPGK

SEQ ID NO: 26191 - protein, 119 aa, Artificial Sequence; identical to SEQ ID NO: 4441
  Description of Artificial Sequence: Synthetic polypeptide
  VH of XENP019352

SEQ ID NO: 26192 - protein, 5 aa, Artificial Sequence
  Description of Artificial Sequence: Synthetic peptide
  XENP019352 vhCDR1
GHLMN

SEQ ID NO: 26193 - protein, 17 aa, Artificial Sequence
  Description of Artificial Sequence: Synthetic peptide
  XENP019352 vhCDR2
LIIPYNGGTSYNQKFKG

SEQ ID NO: 26194 - protein, 10 aa, Artificial Sequence
  Description of Artificial Sequence: Synthetic peptide
  XENP019352 vhCDR3
GLRGFYAMDY

SEQ ID NO: 26195 - protein, 219 aa, Artificial Sequence
  Description of Artificial Sequence: Synthetic polypeptide
  XENP019352 1F4_H0L0_IgG1_PVA_/S267K Light Chain
DVVLTQTPLSLSVSFGDQVSISCRSSQSLVNSYGNTFLSWYLHKPGQSPQLLIFGISNRFSGVPDRFSGSGSGTDFTLKISTIKPEDLGMYYCLQGTHQPPTFGPGTKLEVKRTVAAPSVFIFPPSDEQLKSGTASVVCLLNNFYPREAKVQWKVDNALQSGNSQESVTEQDSKDSTYSLSSTLTLSKADYEKHKVYACEVTHQGLSSPVTKSFNRGEC

SEQ ID NO: 26196 - protein, 112 aa, Artificial Sequence; identical to SEQ ID NO: 4445
  Description of Artificial Sequence: Synthetic polypeptide
  VL of XENP019352

SEQ ID NO: 26197 - protein, 16 aa, Artificial Sequence
  Description of Artificial Sequence: Synthetic peptide
  XENP019352 vlCDR1
RSSQSLVNSYGNTFLS

SEQ ID NO: 26198 - protein, 7 aa, Artificial Sequence
  Description of Artificial Sequence: Synthetic peptide
  XENP019352 vlCDR2
GISNRFS

SEQ ID NO: 26199 - protein, 9 aa, Artificial Sequence
  Description of Artificial Sequence: Synthetic peptide
  XENP019352 vlCDR3
LQGTHQPPT

SEQ ID NO: 26200 - protein, 15 aa, Artificial Sequence
  Description of Artificial Sequence: Synthetic peptide
GGGGSGGGGSGGGGS

SEQ ID NO: 26201 - protein, 18 aa, Artificial Sequence
  Description of Artificial Sequence: Synthetic peptide
GSTSGSGKPGSGEGSTKG

SEQ ID NO: 26202 - protein, 14 aa, Artificial Sequence
  Description of Artificial Sequence: Synthetic peptide
IRPRAIGGSKPRVA

SEQ ID NO: 26203 - protein, 15 aa, Artificial Sequence
  Description of Artificial Sequence: Synthetic peptide
GKGGSGKGGSGKGGS

SEQ ID NO: 26204 - protein, 15 aa, Artificial Sequence
  Description of Artificial Sequence: Synthetic peptide
GGKGSGGKGSGGKGS

SEQ ID NO: 26205 - protein, 15 aa, Artificial Sequence
  Description of Artificial Sequence: Synthetic peptide
GGGKSGGGKSGGGKS

SEQ ID NO: 26206 - protein, 15 aa, Artificial Sequence
  Description of Artificial Sequence: Synthetic peptide
GKGKSGKGKSGKGKS

SEQ ID NO: 26207 - protein, 15 aa, Artificial Sequence
  Description of Artificial Sequence: Synthetic peptide
GGGKSGGKGSGKGGS

SEQ ID NO: 26208 - protein, 15 aa, Artificial Sequence
  Description of Artificial Sequence: Synthetic peptide
GKPGSGKPGSGKPGS

SEQ ID NO: 26209 - protein, 20 aa, Artificial Sequence
  Description of Artificial Sequence: Synthetic peptide
GKPGSGKPGSGKPGSGKPGS

SEQ ID NO: 26210 - protein, 20 aa, Artificial Sequence
  Description of Artificial Sequence: Synthetic peptide
GKGKSGKGKSGKGKSGKGKS

SEQ ID NO: 26211 - protein, 20 aa, Artificial Sequence
  Description of Artificial Sequence: Synthetic peptide
GGGGSGGGGSGGGGSGGGGS

SEQ ID NO: 26212 - protein, 14 aa, Artificial Sequence
  Description of Artificial Sequence: Synthetic peptide
STAGDTHLGGEDFD

SEQ ID NO: 26213 - protein, 15 aa, Artificial Sequence
  Description of Artificial Sequence: Synthetic peptide
GEGGSGEGGSGEGGS

SEQ ID NO: 26214 - protein, 15 aa, Artificial Sequence
  Description of Artificial Sequence: Synthetic peptide
GGEGSGGEGSGGEGS

SEQ ID NO: 26215 - protein, 15 aa, Artificial Sequence
  Description of Artificial Sequence: Synthetic peptide
GGGESGGGESGGGES

SEQ ID NO: 26216 - protein, 15 aa, Artificial Sequence
  Description of Artificial Sequence: Synthetic peptide
GEGESGEGESGEGES

SEQ ID NO: 26217 - protein, 15 aa, Artificial Sequence
  Description of Artificial Sequence: Synthetic peptide
GGGESGGEGSGEGGS

SEQ ID NO: 26218 - protein, 20 aa, Artificial Sequence
  Description of Artificial Sequence: Synthetic peptide
GEGESGEGESGEGESGEGES

SEQ ID NO: 26219 - protein, 15 aa, Artificial Sequence
  Description of Artificial Sequence: Synthetic peptide
GGGGSGGGGSGGGGS

SEQ ID NO: 26220 - protein, 20 aa, Artificial Sequence
  Description of Artificial Sequence: Synthetic peptide
GGGGSGGGGSGGGGSGGGGS

SEQ ID NO: 26221 - protein, 18 aa, Artificial Sequence
  Description of Artificial Sequence: Synthetic peptide
GSTSGSGKPGSGEGSTKG

SEQ ID NO: 26222 - protein, 19 aa, Artificial Sequence
  Description of Artificial Sequence: Synthetic peptide
PRGASKSGSASQTGSAPGS

SEQ ID NO: 26223 - protein, 19 aa, Artificial Sequence
  Description of Artificial Sequence: Synthetic peptide
GTAAAGAGAAGGAAAGAAG

SEQ ID NO: 26224 - protein, 19 aa, Artificial Sequence
  Description of Artificial Sequence: Synthetic peptide
GTSGSSGSGSGGSGSGGGG

SEQ ID NO: 26225 - protein, 20 aa, Artificial Sequence
  Description of Artificial Sequence: Synthetic peptide
GKPGSGKPGSGKPGSGKPGS

SEQ ID NO: 26226 - protein, 288 aa, Homo sapiens
MQIPQAPWPVVWAVLQLGWRPGWFLDSPDRPWNPPTFSPALLVVTEGDNATFTCSFSNTSESFVLNWYRMSPSNQTDKLAAFPEDRSQPGQDCRFRVTQLPNGRDFHMSVVRARRNDSGTYLCGAISLAPKAQIKESLRAELRVTERRAEVPTAHPSPSPRPAGQFQTLVVGVVGGLLGSLVLLVWVLAVICSRAARGTIGARRTGQPLKEDPSAVPVFSVDYGELDFQWREKTPEPPVPCVPEQTEYATIVFPSGMGTSSPARRGSADGPRSAQPLRPEDGHCSWPL

SEQ ID NO: 26227 - protein, 150 aa, Homo sapiens [sequence omitted]

SEQ ID NO: 26228 - protein, 288 aa, Macaca fascicularis
MQIPQAPWPVVWAVLQLGWRPGWFLESPDRPWNAPTFSPALLLVTEGDNATFTCSFSNASESFVLNWYRMSPSNQTDKLAAFPEDRSQPGQDCRFRVTRLPNGRDFHMSVVRARRNDSGTYLCGAISLAPKAQIKESLRAELRVTERRAEVPTAHPSPSPRPAGQFQALVVGVVGGLLGSLVLLVWVLAVICSRAAQGTIEARRTGQPLKEDPSAVPVFSVDYGELDFQWREKTPEPPAPCVPEQTEYATIVFPSGLGTSSPARRGSADGPRSPRPLRPEDGHCSWPL

SEQ ID NO: 26229 - protein, 150 aa, Macaca fascicularis
PGWFLESPDRPWNAPTFSPALLLVTEGDNATFTCSFSNASESFVLNWYRMSPSNQTDKLAAFPEDRSQPGQDCRFRVTRLPNGRDFHMSVVRARRNDSGTYLCGAISLAPKAQIKESLRAELRVTERRAEVPTAHPSPSPRPAGQFQALV

SEQ ID NO: 26230 - protein, 223 aa, Homo sapiens
MACLGFQRHKAQLNLATRTWPCTLLFFLLFIPVFCKAMHVAQPAVVLASSRGIASFVCEYASPGKATEVRVTVLRQADSQVTEVCAATYMMGNELTFLDDSICTGTSSGNQVNLTIQGLRAMDTGLYICKVELMYPPPYYLGIGNGTQIYVIDPEPCPDSDFLLWILAAVSSGLFFYSFLLTAVSLSKMLKKRSPLTTGVYVKMPPTEPECEKQFQPYFIPIN

SEQ ID NO: 26231 - protein, 126 aa, Homo sapiens [sequence omitted]

SEQ ID NO: 26232 - protein, 223 aa, Macaca fascicularis
MACLGFQRHKARLNLATRTRPYTLLFSLLFIPVFSKAMHVAQPAVVLANSRGIASFVCEYASPGKATEVRVTVLRQADSQVTEVCAATYMMGNELTFLDDSICTGTSSGNQVNLTIQGLRAMDTGLYICKVELMYPPPYYMGIGNGTQIYVIDPEPCPDSDFLLWILAAVSSGLFFYSFLLTAVSLSKMLKKRSPLTTGVYVKMPPTEPECEKQFQPYFIPIN

SEQ ID NO: 26233 - protein, 126 aa, Macaca fascicularis
KAMHVAQPAVVLANSRGIASFVCEYASPGKATEVRVTVLRQADSQVTEVCAATYMMGNELTFLDDSICTGTSSGNQVNLTIQGLRAMDTGLYICKVELMYPPPYYMGIGNGTQIYVIDPEPCPDSD

SEQ ID NO: 26234 - protein, 525 aa, Homo sapiens
MWEAQFLGLLFLQPLWVAPVKPLQPGAEVPVVWAQEGAPAQLPCSPTIPLQDLSLLRRAGVTWQHQPDSGPPAAAPGHPLAPGPHPAAPSSWGPRPRRYTVLSVGPGGLRSGRLPLQPRVQLDERGRQRGDFSLWLRPARRADAGEYRAAVHLRDRALSCRLRLRLGQASMTASPPGSLRASDWVILNCSFSRPDRPASVHWFRNRGQGRVPVRESPHHHLAESFLFLPQVSPMDSGPWGCILTYRDGFNVSIMYNLTVLGLEPPTPLTVYAGAGSRVGLPCRLPAGVGTRSFLTAKWTPPGGGPDLLVTGDNGDFTLRLEDVSQAQAGTYTCHIHLQEQQLNATVTLAIITVTPKSFGSPGSLGKLLCEVTPVSGQERFVWSSLDTPSQRSFSGPWLEAQEAQLLSQPWQCQLYQGERLLGAAVYFTELSSPGAQRSGRAPGALPAGHLLLFLILGVLSLLLLVTGAFGFHLWRRQWRPRRFSALEQGIHPPQAQSKIEELEQEPEPEPEPEPEPEPEPEPEQL

SEQ ID NO: 26235 - protein, 422 aa, Homo sapiens
VPVVWAQEGAPAQLPCSPTIPLQDLSLLRRAGVTWQHQPDSGPPAAAPGHPLAPGPHPAAPSSWGPRPRRYTVLSVGPGGLRSGRLPLQPRVQLDERGRQRGDFSLWLRPARRADAGEYRAAVHLRDRALSCRLRLRLGQASMTASPPGSLRASDWVILNCSFSRPDRPASVHWFRNRGQGRVPVRESPHHHLAESFLFLPQVSPMDSGPWGCILTYRDGFNVSIMYNLTVLGLEPPTPLTVYAGAGSRVGLPCRLPAGVGTRSFLTAKWTPPGGGPDLLVTGDNGDFTLRLEDVSQAQAGTYTCHIHLQEQQLNATVTLAIITVTPKSFGSPGSLGKLLCEVTPVSGQERFVWSSLDTPSQRSFSGPWLEAQEAQLLSQPWQCQLYQGERLLGAAVYFTELSSPGAQRSGRAPGALPAGHL

SEQ ID NO: 26236 - protein, 533 aa, Macaca fascicularis
  MOD_RES (74)..(74): Any amino acid
MWEAQFLGLLFLQPLWVAPVKPPQPGAEISVVWAQEGAPAQLPCSPTIPLQDLSLLRRAGVTWQHQPDSGPPAXAPGHPPVPGHRPAAPYSWGPRPRRYTVLSVGPGGLRSGRLPLQPRVQLDERGRQRGDFSLWLRPARRADAGEYRATVHLRDRALSCRLRLRVGQASMTASPPGSLRTSDWVILNCSFSRPDRPASVHWFRSRGQGRVPVQGSPHHHLAESFLFLPHVGPMDSGLWGCILTYRDGFNVSIMYNLTVLGLEPATPLTVYAGAGSRVELPCRLPPAVGTQSFLTAKWAPPGGGPDLLVAGDNGDFTLRLEDVSQAQAGTYICHIRLQGQQLNATVTLAIITVTPKSFGSPGSLGKLLCEVTPASGQEHFVWSPLNTPSQRSFSGPWLEAQEAQLLSQPWQCQLHQGERLLGAAVYFTELSSPGAQRSGRAPGALRAGHLPLFLILGVLFLLLLVTGAFGFHLWRRQWRPRRFSALEQGIHPPQAQSKIEELEQEPELEPEPELERELGPEPEPGPEPEPEQL

SEQ ID NO: 26237 - protein, 422 aa, Macaca fascicularis
  MOD_RES (46)..(46): Any amino acid
ISVVWAQEGAPAQLPCSPTIPLQDLSLLRRAGVTWQHQPDSGPPAXAPGHPPVPGHRPAAPYSWGPRPRRYTVLSVGPGGLRSGRLPLQPRVQLDERGRQRGDFSLWLRPARRADAGEYRATVHLRDRALSCRLRLRVGQASMTASPPGSLRTSDWVILNCSFSRPDRPASVHWFRSRGQGRVPVQGSPHHHLAESFLFLPHVGPMDSGLWGCILTYRDGFNVSIMYNLTVLGLEPATPLTVYAGAGSRVELPCRLPPAVGTQSFLTAKWAPPGGGPDLLVAGDNGDFTLRLEDVSQAQAGTYICHIRLQGQQLNATVTLAIITVTPKSFGSPGSLGKLLCEVTPASGQEHFVWSPLNTPSQRSFSGPWLEAQEAQLLSQPWQCQLHQGERLLGAAVYFTELSSPGAQRSGRAPGALRAGHL

SEQ ID NO: 26238 - protein, 300 aa, Homo sapiens
MFSHLPFDCVLLLLLLLLTRSSEVEYRAEVGQNAYLPCFYTPAAPGNLVPVCWGKGACPVFECGNVVLRTDERDVNYWTSRYWLNGDFRKGDVSLTIENVTLADSGIYCCRIQIPGIMNDEKFNLKLVIKPAKVTPAPTRQRDFTAAFPRMLTTRGHGPAETQTLGSLPDINLTQISTLANELRDSRLANDLRDSGATIRIGIYIGAGICAGLALALIFGALIFKWYSHSKEKIQNLSLISLANLPPSGLANAVAEGIRSEENIYTIEENVYEVEEPNEYYCYVSSRQQPSQPLGCRFAM

SEQ ID NO: 26239 - protein, 181 aa, Homo sapiens
SEVEYRAEVGQNAYLPCFYTPAAPGNLVPVCWGKGACPVFECGNVVLRTDERDVNYWTSRYWLNGDFRKGDVSLTIENVTLADSGIYCCRIQIPGIMNDEKFNLKLVIKPAKVTPAPTRQRDFTAAFPRMLTTRGHGPAETQTLGSLPDINLTQISTLANELRDSRLANDLRDSGATIRIG

SEQ ID NO: 26240 - protein, 302 aa, Macaca fascicularis
MFSHLPFDCVLLLLLLLLTRSSEVEYIAEVGQNAYLPCSYTPAPPGNLVPVCWGKGACPVFDCSNVVLRTDNRDVNDRTSGRYWLKGDFHKGDVSLTIENVTLADSGVYCCRIQIPGIMNDEKHNVKLVVIKPAKVTPAPTLQRDLTSAFPRMLTTGEHGPAETQTPGSLPDVNLTVSNFFCELQIFTLTNELRDSGATIRTAIYIAAGISAGLALALIFGALIFKWYSHSKEKTQNLSLISLANIPPSGLANAVAEGIRSEENIYTIEEDVYEVEEPNEYYCYVSSGQQPSQPLGCRVAMP

SEQ ID NO: 26241 - protein, 182 aa, Macaca fascicularis
SEVEYIAEVGQNAYLPCSYTPAPPGNLVPVCWGKGACPVFDCSNVVLRTDNRDVNDRTSGRYWLKGDFHKGDVSLTIENVTLADSGVYCCRIQIPGIMNDEKHNVKLVVIKPAKVTPAPTLQRDLTSAFPRMLTTGEHGPAETQTPGSLPDVNLTVSNFFCELQIFTLTNELRDSGATIRTA

SEQ ID NO: 26242 - protein, 290 aa, Homo sapiens
MRIFAVFIFMTYWHLLNAFTVTVPKDLYVVEYGSNMTIECKFPVEKQLDLAALIVYWEMEDKNIIQFVHGEEDLKVQHSSYRQRARLLKDQLSLGNAALQITDVKLQDAGVYRCMISYGGADYKRITVKVNAPYNKINQRILVVDPVTSEHELTCQAEGYPKAEVIWTSSDHQVLSGKTTTTNSKREEKLFNVTSTLRINTTTNEIFYCTFRRLDPEENHTAELVIPELPLAHPPNERTHLVILGAILLCLGVALTFIFRLRKGRMMDVKKCGIQDTNSKKQSDTHLEET

SEQ ID NO: 26243 - protein, 220 aa, Homo sapiens
FTVTVPKDLYVVEYGSNMTIECKFPVEKQLDLAALIVYWEMEDKNIIQFVHGEEDLKVQHSSYRQRARLLKDQLSLGNAALQITDVKLQDAGVYRCMISYGGADYKRITVKVNAPYNKINQRILVVDPVTSEHELTCQAEGYPKAEVIWTSSDHQVLSGKTTTTNSKREEKLFNVTSTLRINTTTNEIFYCTFRRLDPEENHTAELVIPELPLAHPPNER

SEQ ID NO: 26244 - protein, 290 aa, Macaca fascicularis
MRIFAVFIFTIYWHLLNAFTVTVPKDLYVVEYGSNMTIECKFPVEKQLDLTSLIVYWEMEDKNIIQFVHGEEDLKVQHSNYRQRAQLLKDQLSLGNAALRITDVKLQDAGVYRCMISYGGADYKRITVKVNAPYNKINQRILVVDPVTSEHELTCQAEGYPKAEVIWTSSDHQVLSGKTTTTNSKREEKLLNVTSTLRINTTANEIFYCIFRRLDPEENHTAELVIPELPLALPPNERTHLVILGAIFLLLGVALTFIFYLRKGRMMDMKKCGIRVTNSKKQRDTQLEET

SEQ ID NO: 26245 - protein, 220 aa, Macaca fascicularis
FTVTVPKDLYVVEYGSNMTIECKFPVEKQLDLTSLIVYWEMEDKNIIQFVHGEEDLKVQHSNYRQRAQLLKDQLSLGNAALRITDVKLQDAGVYRCMISYGGADYKRITVKVNAPYNKINQRILVVDPVTSEHELTCQAEGYPKAEVIWTSSDHQVLSGKTTTTNSKREEKLLNVTSTLRINTTANEIFYCIFRRLDPEENHTAELVIPELPLALPPNER

SEQ ID NO: 26246 - protein, 199 aa, Homo sapiens
MKSGLWYFFLFCLRIKVLTGEINGSANYEMFIFHNGGVQILCKYPDIVQQFKMQLLKGGQILCDLTKTKGSGNTVSIKSLKFCHSQLSNNSVSFFLYNLDHSHANYYFCNLSIFDPPPFKVTLTGGYLHIYESQLCCQLKFWLPIGCAAFVVVCILGCILICWLTKKKYSSSVHDPNGEYMFMRAVNTAKKSRLTDVTL

SEQ ID NO: 26247 - protein, 120 aa, Homo sapiens
EINGSANYEMFIFHNGGVQILCKYPDIVQQFKMQLLKGGQILCDLTKTKGSGNTVSIKSLKFCHSQLSNNSVSFFLYNLDHSHANYYFCNLSIFDPPPFKVTLTGGYLHIYESQLCCQLK

SEQ ID NO: 26248 - protein, 199 aa, Macaca fascicularis
MKSGLWYFFLFCLHMKVLTGEINGSANYEMFIFHNGGVQILCKYPDIVQQFKMQLLKGGQILCDLTKTKGSGNTVSIKSLKFCHSQLSNNSVSFFLYNLDRSHANYYFCNLSIFDPPPFKVTLTGGYLHIYESQLCCQLKFWLPIGCATFVVVCIFGCILICWLTKKKYSSTVHDPNGEYMFMRAVNTAKKSRLTDVTV

SEQ ID NO: 26249 - protein, 120 aa, Macaca fascicularis
EINGSANYEMFIFHNGGVQILCKYPDIVQQFKMQLLKGGQILCDLTKTKGSGNTVSIKSLKFCHSQLSNNSVSFFLYNLDRSHANYYFCNLSIFDPPPFKVTLTGGYLHIYESQLCCQLK

SEQ ID NO: 26250 - protein, 241 aa, Homo sapiens
MAQHGAMGAFRALCGLALLCALSLGQRPTGGPGCGPGRLLLGTGTDARCCRVHTTRCCRDYPGEECCSEWDCMCVQPEFHCGDPCCTTCRHHPCPPGQGVQSQGKFSFGFQCIDCASGTFSGGHEGHCKPWTDCTQFGFLTVFPGNKTHNAVCVPGSPPAEPLGWLTVVLLAVAACVLLLTSAQLGLHIWQLRSQCMWPRETQLLLEVPPSTEDARSCQFPEEERGERSAEEKGRLGDLWV

SEQ ID NO: 26251 - protein, 137 aa, Homo sapiens
QRPTGGPGCGPGRLLLGTGTDARCCRVHTTRCCRDYPGEECCSEWDCMCVQPEFHCGDPCCTTCRHHPCPPGQGVQSQGKFSFGFQCIDCASGTFSGGHEGHCKPWTDCTQFGFLTVFPGNKTHNAVCVPGSPPAEP

SEQ ID NO: 26252 - protein, 235 aa, Macaca fascicularis
MCACGTLCCLALLCAASLGQRPTGGPGCGPGRLLLGTGKDARCCRVHPTRCCRDYQSEECCSEWDCVCVQPEFHCGNPCCTTCQHHPCPSGQGVQPQGKFSFGFRCVDCALGTFSRGHDGHCKPWTDCTQFGFLTVFPGNKTHNAVCVPGSPPAEPPGWLTIVLLAVAACVLLLTSAQLGLHIWQLGSQPTGPRETQLLLEVPPSTEDASSCQFPEEERGERLAEEKGRLGDLWV

SEQ ID NO: 26253 - protein, 137 aa, Macaca fascicularis
QRPTGGPGCGPGRLLLGTGKDARCCRVHPTRCCRDYQSEECCSEWDCVCVQPEFHCGNPCCTTCQHHPCPSGQGVQPQGKFSFGFRCVDCALGTFSRGHDGHCKPWTDCTQFGFLTVFPGNKTHNAVCVPGSPPAEP

SEQ ID NO: 26254 - protein, 277 aa, Homo sapiens
MCVGARRLGRGPCAALLLLGLGLSTVTGLHCVGDTYPSNDRCCHECRPGNGMVSRCSRSQNTVCRPCGPGFYNDVVSSKPCKPCTWCNLRSGSERKQLCTATQDTVCRCRAGTQPLDSYKPGVDCAPCPPGHFSPGDNQACKPWTNCTLAGKHTLQPASNSSDAICEDRDPPATQPQETQGPPARPITVQPTEAWPRTSQGPSTRPVEVPGGRAVAAILGLGLVLGLLGPLAILLALYLLRRDQRLPPDAHKPPGGGSFRTPIQEEQADAHSTLAKI

SEQ ID NO: 26255 - protein, 186 aa, Homo sapiens [sequence omitted]

SEQ ID NO: 26256 - protein, 277 aa, Macaca fascicularis
MCVGARRLGRGPCAALLLLGLGLSTTAKLHCVGDTYPSNDRCCQECRPGNGMVSRCNRSQNTVCRPCGPGFYNDVVSAKPCKACTWCNLRSGSERKQPCTATQDTVCRCRAGTQPLDSYKPGVDCAPCPPGHFSPGDNQACKPWTNCTLAGKHTLQPASNSSDAICEDRDPPPTQPQETQGPPARPTTVQPTEAWPRTSQRPSTRPVEVPRGPAVAAILGLGLALGLLGPLAMLLALLLLRRDQRLPPDAPKAPGGGSFRTPIQEEQADAHSALAKI

SEQ ID NO: 26257 - protein, 186 aa, Macaca fascicularis
LHCVGDTYPSNDRCCQECRPGNGMVSRCNRSQNTVCRPCGPGFYNDVVSAKPCKACTWCNLRSGSERKQPCTATQDTVCRCRAGTQPLDSYKPGVDCAPCPPGHFSPGDNQACKPWTNCTLAGKHTLQPASNSSDAICEDRDPPPTQPQETQGPPARPTTVQPTEAWPRTSQRPSTRPVEVPRGPA

SEQ ID NO: 26258 - protein, 255 aa, Homo sapiens
MGNSCYNIVATLLLVLNFERTRSLQDPCSNCPAGTFCDNNRNQICSPCPPNSFSSAGGQRTCDICRQCKGVFRTRKECSSTSNAECDCTPGFHCLGAGCSMCEQDCKQGQELTKKGCKDCCFGTFNDQKRGICRPWTNCSLDGKSVLVNGTKERDVVCGPSPADLSPGASSVTPPAPAREPGHSPQIISFFLALTSTALLFLLFFLTLRFSVVKRGRKKLLYIFKQPFMRPVQTTQEEDGCSCRFPEEEEGGCEL

SEQ ID NO: 26259 - protein, 163 aa, Homo sapiens
LQDPCSNCPAGTFCDNNRNQICSPCPPNSFSSAGGQRTCDICRQCKGVFRTRKECSSTSNAECDCTPGFHCLGAGCSMCEQDCKQGQELTKKGCKDCCFGTFNDQKRGICRPWTNCSLDGKSVLVNGTKERDVVCGPSPADLSPGASSVTPPAPAREPGHSPQ

SEQ ID NO: 26260 - protein, 254 aa, Macaca fascicularis
MGNSCYNIVATLLLVLNFERTRSLQDLCSNCPAGTFCDNNRSQICSPCPPNSFSSAGGQRTCDICRQCKGVFKTRKECSSTSNAECDCISGYHCLGAECSMCEQDCKQGQELTKKGCKDCCFGTFNDQKRGICRPWTNCSLDGKSVLVNGTKERDVVCGPSPADLSPGASSATPPAPAREPGHSPQIIFFLALTSTVVLFLLFFLVLRFSVVKRSRKKLLYIFKQPFMRPVQTTQEEDGCSCRFPEEEEGGCEL

SEQ ID NO: 26261 - protein, 163 aa, Macaca fascicularis
LQDLCSNCPAGTFCDNNRSQICSPCPPNSFSSAGGQRTCDICRQCKGVFKTRKECSSTSNAECDCISGYHCLGAECSMCEQDCKQGQELTKKGCKDCCFGTFNDQKRGICRPWTNCSLDGKSVLVNGTKERDVVCGPSPADLSPGASSATPPAPAREPGHSPQ

SEQ ID NO: 26262 - protein, 450 aa, Artificial Sequence
  Description of Artificial Sequence: Synthetic polypeptide
  XENP014410 20H4.9[4-1BB]_H0L0_IgG1_PVA_/S267K Heavy Chain
QVQLQQWGAGLLKPSETLSLTCAVYGGSFSGYYWSWIRQSPEKGLEWIGEINHGGYVTYNPSLESRVTISVDTSKNQFSLKLSSVTAADTAVYYCARDYGPGNYDWYFDLWGRGTLVTVSSASTKGPSVFPLAPSSKSTSGGTAALGCLVKDYFPEPVTVSWNSGALTSGVHTFPAVLQSSGLYSLSSVVTVPSSSLGTQTYICNVNHKPSNTKVDKKVEPKSCDKTHTCPPCPAPPVAGPSVFLFPPKPKDTLMISRTPEVTCVVVDVKHEDPEVKFNWYVDGVEVHNAKTKPREEQYNSTYRVVSVLTVLHQDWLNGKEYKCKVSNKALPAPIEKTISKAKGQPREPQVYTLPPSREEMTKNQVSLTCLVKGFYPSDIAVEWESNGQPENNYKTTPPVLDSDGSFFLYSKLTVDKSRWQQGNVFSCSVMHEALHNHYTQKSLSLSPGK

SEQ ID NO: 26263 - protein, 121 aa, Artificial Sequence [sequence omitted]

SEQ ID NO: 26264 - protein, 5 aa, Artificial Sequence
  Description of Artificial Sequence: Synthetic peptide
  XENP014410 vhCDR1
GYYWS

SEQ ID NO: 26265 - protein, 16 aa, Artificial Sequence
  Description of Artificial Sequence: Synthetic peptide
  XENP014410 vhCDR2
EINHGGYVTYNPSLES

SEQ ID NO: 26266 - protein, 13 aa, Artificial Sequence
  Description of Artificial Sequence: Synthetic peptide
  XENP014410 vhCDR3
DYGPGNYDWYFDL

SEQ ID NO: 26267 - protein, 216 aa, Artificial Sequence
  Description of Artificial Sequence: Synthetic polypeptide
  XENP014410 20H4.9[4-1BB]_H0L0_IgG1_PVA_/S267K Light Chain
EIVLTQSPATLSLSPGERATLSCRASQSVSSYLAWYQQKPGQAPRLLIYDASNRATGIPARFSGSGSGTDFTLTISSLEPEDFAVYYCQQRSNWPPALTFGGGTKVEIKRTVAAPSVFIFPPSDEQLKSGTASVVCLLNNFYPREAKVQWKVDNALQSGNSQESVTEQDSKDSTYSLSSTLTLSKADYEKHKVYACEVTHQGLSSPVTKSFNRGEC

SEQ ID NO: 26268 - protein, 109 aa, Artificial Sequence [sequence omitted]

SEQ ID NO: 26269 - protein, 11 aa, Artificial Sequence
  Description of Artificial Sequence: Synthetic peptide
  XENP014410 vlCDR1
RASQSVSSYLA

SEQ ID NO: 26270 - protein, 7 aa, Artificial Sequence
  Description of Artificial Sequence: Synthetic peptide
  XENP014410 vlCDR2
DASNRAT

SEQ ID NO: 26271 - protein, 11 aa, Artificial Sequence
  Description of Artificial Sequence: Synthetic peptide
  XENP014410 vlCDR3
QQRSNWPPALT

SEQ ID NO: 26272 - protein, 447 aa, Artificial Sequence
  Description of Artificial Sequence: Synthetic polypeptide
  XENP016437 11D4[OX40]_H0L0_IgG1_PVA_/S267K Heavy Chain
EVQLVESGGGLVQPGGSLRLSCAASGFTFSSYSMNWVRQAPGKGLEWVSYISSSSSTIDYADSVKGRFTISRDNAKNSLYLQMNSLRDEDTAVYYCARESGWYLFDYWGQGTLVTVSSASTKGPSVFPLAPSSKSTSGGTAALGCLVKDYFPEPVTVSWNSGALTSGVHTFPAVLQSSGLYSLSSVVTVPSSSLGTQTYICNVNHKPSNTKVDKKVEPKSCDKTHTCPPCPAPPVAGPSVFLFPPKPKDTLMISRTPEVTCVVVDVKHEDPEVKFNWYVDGVEVHNAKTKPREEQYNSTYRVVSVLTVLHQDWLNGKEYKCKVSNKALPAPIEKTISKAKGQPREPQVYTLPPSREEMTKNQVSLTCLVKGFYPSDIAVEWESNGQPENNYKTTPPVLDSDGSFFLYSKLTVDKSRWQQGNVFSCSVMHEALHNHYTQKSLSLSPGK

SEQ ID NO: 26273 - protein, 118 aa, Artificial Sequence
  Description of Artificial Sequence: Synthetic polypeptide
  VH of XENP016437
EVQLVESGGGLVQPGGSLRLSCAASGFTFSSYSMNWVRQAPGKGLEWVSYISSSSSTIDYADSVKGRFTISRDNAKNSLYLQMNSLRDEDTAVYYCARESGWYLFDYWGQGTLVTVSS

SEQ ID NO: 26274 - protein, 5 aa, Artificial Sequence
  Description of Artificial Sequence: Synthetic peptide
  XENP016437 vhCDR1
SYSMN

SEQ ID NO: 26275 - protein, 17 aa, Artificial Sequence
  Description of Artificial Sequence: Synthetic peptide
  XENP016437 vhCDR2
YISSSSSTIDYADSVKG

SEQ ID NO: 26276 - protein, 9 aa, Artificial Sequence
  Description of Artificial Sequence: Synthetic peptide
  XENP016437 vhCDR3
ESGWYLFDY

SEQ ID NO: 26277 - protein, 214 aa, Artificial Sequence
  Description of Artificial Sequence: Synthetic polypeptide
  XENP016437 11D4[OX40]_H0L0_IgG1_PVA_/S267K Light Chain
DIQMTQSPSSLSASVGDRVTITCRASQGISSWLAWYQQKPEKAPKSLIYAASSLQSGVPSRFSGSGSGTDFTLTISSLQPEDFATYYCQQYNSYPPTFGGGTKVEIKRTVAAPSVFIFPPSDEQLKSGTASVVCLLNNFYPREAKVQWKVDNALQSGNSQESVTEQDSKDSTYSLSSTLTLSKADYEKHKVYACEVTHQGLSSPVTKSFNRGEC

SEQ ID NO: 26278 - protein, 107 aa, Artificial Sequence
  Description of Artificial Sequence: Synthetic polypeptide
  VL of XENP016437
DIQMTQSPSSLSASVGDRVTITCRASQGISSWLAWYQQKPEKAPKSLIYAASSLQSGVPSRFSGSGSGTDFTLTISSLQPEDFATYYCQQYNSYPPTFGGGTKVEIK

SEQ ID NO: 26279 - protein, 11 aa, Artificial Sequence
  Description of Artificial Sequence: Synthetic peptide
  XENP016437 vlCDR1
RASQGISSWLA

SEQ ID NO: 26280 - protein, 7 aa, Artificial Sequence
  Description of Artificial Sequence: Synthetic peptide
  XENP016437 vlCDR2
AASSLQS

SEQ ID NO: 26281 - protein, 9 aa, Artificial Sequence
  Description of Artificial Sequence: Synthetic peptide
  XENP016437 vlCDR3
QQYNSYPPT

SEQ ID NO: 26282 - protein, 451 aa, Artificial Sequence
  Description of Artificial Sequence: Synthetic polypeptide
  XENP016438 1D8[GITR]_H0L0_IgG1_PVA_/S267K Heavy Chain
QVTLKESGPGILKPSQTLSLTCSFSGFSLSTSGMGVGWIRQPSGKGLEWLAHIWWDDDKYYSPSLKSQLTISKDTSRNQVFLKITSLDTADTATYYCVRSYYYGSSGAMDYWGQGTSVTVSSASTKGPSVFPLAPSSKSTSGGTAALGCLVKDYFPEPVTVSWNSGALTSGVHTFPAVLQSSGLYSLSSVVTVPSSSLGTQTYICNVNHKPSNTKVDKKVEPKSCDKTHTCPPCPAPPVAGPSVFLFPPKPKDTLMISRTPEVTCVVVDVKHEDPEVKFNWYVDGVEVHNAKTKPREEQYNSTYRVVSVLTVLHQDWLNGKEYKCKVSNKALPAPIEKTISKAKGQPREPQVYTLPPSREEMTKNQVSLTCLVKGFYPSDIAVEWESNGQPENNYKTTPPVLDSDGSFFLYSKLTVDKSRWQQGNVFSCSVMHEALHNHYTQKSLSLSPGK

SEQ ID NO: 26283 - protein, 122 aa, Artificial Sequence
  Description of Artificial Sequence: Synthetic polypeptide
  VH of XENP016438
QVTLKESGPGILKPSQTLSLTCSFSGFSLSTSGMGVGWIRQPSGKGLEWLAHIWWDDDKYYSPSLKSQLTISKDTSRNQVFLKITSLDTADTATYYCVRSYYYGSSGAMDYWGQGTSVTVSS

SEQ ID NO: 26284 - protein, 7 aa, Artificial Sequence
  Description of Artificial Sequence: Synthetic peptide
  XENP016438 vhCDR1
TSGMGVG

SEQ ID NO: 26285 - protein, 16 aa, Artificial Sequence
  Description of Artificial Sequence: Synthetic peptide
  XENP016438 vhCDR2
HIWWDDDKYYSPSLKS

SEQ ID NO: 26286 - protein, 12 aa, Artificial Sequence
  Description of Artificial Sequence: Synthetic peptide
  XENP016438 vhCDR3
SYYYGSSGAMDY

SEQ ID NO: 26287 - protein, 219 aa, Artificial Sequence
  Description of Artificial Sequence: Synthetic polypeptide
  XENP016438 1D8[GITR]_H0L0_IgG1_PVA_/S267K Light Chain
DIVMTQTPLSLPVSLGDQASISCRSSQSLVHSDGNTYLHWYLQKPGQSPKLLIYKVSKRFSGVPDRFSGSGSGTDFTLKISRVEAEDLGVYFCSQSTHVPPTFGGGTKLEIKRTVAAPSVFIFPPSDEQLKSGTASVVCLLNNFYPREAKVQWKVDNALQSGNSQESVTEQDSKDSTYSLSSTLTLSKADYEKHKVYACEVTHQGLSSPVTKSFNRGEC

SEQ ID NO: 26288 - protein, 112 aa, Artificial Sequence
  Description of Artificial Sequence: Synthetic polypeptide
  VL of XENP016438
DIVMTQTPLSLPVSLGDQASISCRSSQSLVHSDGNTYLHWYLQKPGQSPKLLIYKVSKRFSGVPDRFSGSGSGTDFTLKISRVEAEDLGVYFCSQSTHVPPTFGGGTKLEIK

SEQ ID NO: 26289 - protein, 16 aa, Artificial Sequence
  Description of Artificial Sequence: Synthetic peptide
  XENP016438 vlCDR1
RSSQSLVHSDGNTYLH

SEQ ID NO: 26290 - protein, 7 aa, Artificial Sequence
  Description of Artificial Sequence: Synthetic peptide
  XENP016438 vlCDR2
KVSKRFS

SEQ ID NO: 26291 - protein, 9 aa, Artificial Sequence
  Description of Artificial Sequence: Synthetic peptide
  XENP016438 vlCDR3
SQSTHVPPT

SEQ ID NO: 26292 - protein, 454 aa, Artificial Sequence
  Description of Artificial Sequence: Synthetic polypeptide
  XENP016435 [anti-ICOS]_H0L0_IgG1_PVA_/S267K Heavy Chain
QVQLVQSGAEVKKPGASVKVSCKASGYTFTGYYMHWVRQAPGQGLEWMGWINPHSGGTNYAQKFQGRVTMTRDTSISTAYMELSRLRSDDTAVYYCARTYYYDSSGYYHDAFDIWGQGTMVTVSSASTKGPSVFPLAPSSKSTSGGTAALGCLVKDYFPEPVTVSWNSGALTSGVHTFPAVLQSSGLYSLSSVVTVPSSSLGTQTYICNVNHKPSNTKVDKKVEPKSCDKTHTCPPCPAPPVAGPSVFLFPPKPKDTLMISRTPEVTCVVVDVKHEDPEVKFNWYVDGVEVHNAKTKPREEQYNSTYRVVSVLTVLHQDWLNGKEYKCKVSNKALPAPIEKTISKAKGQPREPQVYTLPPSREEMTKNQVSLTCLVKGFYPSDIAVEWESNGQPENNYKTTPPVLDSDGSFFLYSKLTVDKSRWQQGNVFSCSVMHEALHNHYTQKSLSLSPGK

SEQ ID NO: 26293 - protein, 125 aa, Artificial Sequence
  Description of Artificial Sequence: Synthetic polypeptide
  VH of XENP016435
QVQLVQSGAEVKKPGASVKVSCKASGYTFTGYYMHWVRQAPGQGLEWMGWINPHSGGTNYAQKFQGRVTMTRDTSISTAYMELSRLRSDDTAVYYCARTYYYDSSGYYHDAFDIWGQGTMVTVSS

SEQ ID NO: 26294 - protein, 5 aa, Artificial Sequence
  Description of Artificial Sequence: Synthetic peptide
  XENP016435 vhCDR1
GYYMH

SEQ ID NO: 26295 - protein, 17 aa, Artificial Sequence
  Description of Artificial Sequence: Synthetic peptide
  XENP016435 vhCDR2
WINPHSGGTNYAQKFQG

SEQ ID NO: 26296 - protein, 16 aa, Artificial Sequence
  Description of Artificial Sequence: Synthetic peptide
  XENP016435 vhCDR3
TYYYDSSGYYHDAFDI

SEQ ID NO: 26297 - protein, 214 aa, Artificial Sequence
  Description of Artificial Sequence: Synthetic polypeptide
  XENP016435 [anti-ICOS]_H0L0_IgG1_PVA_/S267K Light Chain
DIQMTQSPSSVSASVGDRVTITCRASQGISRLLAWYQQKPGKAPKLLIYVASSLQSGVPSRFSGSGSGTDFTLTISSLQPEDFATYYCQQANSFPWTFGQGTKVEIKRTVAAPSVFIFPPSDEQLKSGTASVVCLLNNFYPREAKVQWKVDNALQSGNSQESVTEQDSKDSTYSLSSTLTLSKADYEKHKVYACEVTHQGLSSPVTKSFNRGEC

SEQ ID NO: 26298 - protein, 107 aa, Artificial Sequence
  Description of Artificial Sequence: Synthetic polypeptide
  VL of XENP016435
DIQMTQSPSSVSASVGDRVTITCRASQGISRLLAWYQQKPGKAPKLLIYVASSLQSGVPSRFSGSGSGTDFTLTISSLQPEDFATYYCQQANSFPWTFGQGTKVEIK

SEQ ID NO: 26299 - protein, 11 aa, Artificial Sequence
  Description of Artificial Sequence: Synthetic peptide
  XENP016435 vlCDR1
RASQGISRLLA

SEQ ID NO: 26300 - protein, 7 aa, Artificial Sequence
  Description of Artificial Sequence: Synthetic peptide
  XENP016435 vlCDR2
VASSLQS

SEQ ID NO: 26301 - protein, 9 aa, Artificial Sequence
  Description of Artificial Sequence: Synthetic peptide
  XENP016435 vlCDR3
QQANSFPWT

SEQ ID NO: 26302 - protein, 452 aa, Artificial Sequence
  Description of Artificial Sequence: Synthetic polypeptide
  XENP021820 GSK_314.8[ICOS]_H0L0_IgG1_PVA_/S267K Heavy Chain
QVQLQQPGTELMKPGASVKLSCKASGYTFTTYWMHWVKQRPGQGLEWIGEIDPSDSYVNYNQNFKGKATLTVDKSSSTAYIQLSSLTSEDSAVYFCARSPDYYGTSLAWFDYWGQGTLVTVSTASTKGPSVFPLAPSSKSTSGGTAALGCLVKDYFPEPVTVSWNSGALTSGVHTFPAVLQSSGLYSLSSVVTVPSSSLGTQTYICNVNHKPSNTKVDKKVEPKSCDKTHTCPPCPAPPVAGPSVFLFPPKPKDTLMISRTPEVTCVVVDVKHEDPEVKFNWYVDGVEVHNAKTKPREEQYNSTYRVVSVLTVLHQDWLNGKEYKCKVSNKALPAPIEKTISKAKGQPREPQVYTLPPSREEMTKNQVSLTCLVKGFYPSDIAVEWESNGQPENNYKTTPPVLDSDGSFFLYSKLTVDKSRWQQGNVFSCSVMHEALHNHYTQKSLSLSPGK

SEQ ID NO: 26303 - protein, 123 aa, Artificial Sequence
  Description of Artificial Sequence: Synthetic polypeptide
  VH of XENP021820
QVQLQQPGTELMKPGASVKLSCKASGYTFTTYWMHWVKQRPGQGLEWIGEIDPSDSYVNYNQNFKGKATLTVDKSSSTAYIQLSSLTSEDSAVYFCARSPDYYGTSLAWFDYWGQGTLVTVST

SEQ ID NO: 26304 - protein, 5 aa, Artificial Sequence
  Description of Artificial Sequence: Synthetic peptide
  XENP021820 vhCDR1
TYWMH

SEQ ID NO: 26305 - protein, 17 aa, Artificial Sequence
  Description of Artificial Sequence: Synthetic peptide
  XENP021820 vhCDR2
EIDPSDSYVNYNQNFKG

SEQ ID NO: 26306 - protein, 14 aa, Artificial Sequence
  Description of Artificial Sequence: Synthetic peptide
  XENP021820 vhCDR3
SPDYYGTSLAWFDY

SEQ ID NO: 26307 - protein, 219 aa, Artificial Sequence
  Description of Artificial Sequence: Synthetic polypeptide
  XENP021820 GSK_314.8[ICOS]_H0L0_IgG1_PVA_/S267K Light Chain
DIVMTQAAPSVPVTPGESVSISCRSSKSPLHSNGNIYLYWFLQRPGQSPQLLIYRMSNLASGVPDRFSGSGSGTTFTLKISRVEAEDVGVYYCMQHLEYPYTFGGGTKLEIKRTVAAPSVFIFPPSDEQLKSGTASVVCLLNNFYPREAKVQWKVDNALQSGNSQESVTEQDSKDSTYSLSSTLTLSKADYEKHKVYACEVTHQGLSSPVTKSFNRGEC

SEQ ID NO: 26308 - protein, 112 aa, Artificial Sequence
  Description of Artificial Sequence: Synthetic polypeptide
  VL of XENP021820
DIVMTQAAPSVPVTPGESVSISCRSSKSPLHSNGNIYLYWFLQRPGQSPQLLIYRMSNLASGVPDRFSGSGSGTTFTLKISRVEAEDVGVYYCMQHLEYPYTFGGGTKLEIK

SEQ ID NO: 26309 - protein, 16 aa, Artificial Sequence
  Description of Artificial Sequence: Synthetic peptide
  XENP021820 vlCDR1
RSSKSPLHSNGNIYLY

SEQ ID NO: 26310 - protein, 7 aa, Artificial Sequence
  Description of Artificial Sequence: Synthetic peptide
  XENP021820 vlCDR2
RMSNLAS

SEQ ID NO: 26311 - protein, 9 aa, Artificial Sequence
  Description of Artificial Sequence: Synthetic peptide
  XENP021820 vlCDR3
MQHLEYPYT

SEQ ID NO: 26312 - protein, 453 aa, Artificial Sequence
  Description of Artificial Sequence: Synthetic polypeptide
  XENP021821 GSK_88.2[ICOS]_H0L0_IgG1_PVA_/S267K Heavy Chain
QVQLQQPGAELVRPGASVKLSCKASGYSFTSYWINWVKQRPGQGLEWIGNIYPSDSYTNYNQMFKDKATLTVDKSSNTAYMQLTSPTSEDSAVYYCTRWNLSYYFDNNYYLDYWGQGTTLTVSSASTKGPSVFPLAPSSKSTSGGTAALGCLVKDYFPEPVTVSWNSGALTSGVHTFPAVLQSSGLYSLSSVVTVPSSSLGTQTYICNVNHKPSNTKVDKKVEPKSCDKTHTCPPCPAPPVAGPSVFLFPPKPKDTLMISRTPEVTCVVVDVKHEDPEVKFNWYVDGVEVHNAKTKPREEQYNSTYRVVSVLTVLHQDWLNGKEYKCKVSNKALPAPIEKTISKAKGQPREPQVYTLPPSREEMTKNQVSLTCLVKGFYPSDIAVEWESNGQPENNYKTTPPVLDSDGSFFLYSKLTVDKSRWQQGNVFSCSVMHEALHNHYTQKSLSLSPGK

SEQ ID NO: 26313 - protein, 124 aa, Artificial Sequence
  Description of Artificial Sequence: Synthetic polypeptide
  VH of XENP021821
QVQLQQPGAELVRPGASVKLSCKASGYSFTSYWINWVKQRPGQGLEWIGNIYPSDSYTNYNQMFKDKATLTVDKSSNTAYMQLTSPTSEDSAVYYCTRWNLSYYFDNNYYLDYWGQGTTLTVSS

SEQ ID NO: 26314 - protein, 5 aa, Artificial Sequence
  Description of Artificial Sequence: Synthetic peptide
  XENP021821 vhCDR1
SYWIN

SEQ ID NO: 26315 - protein, 17 aa, Artificial Sequence
  Description of Artificial Sequence: Synthetic peptide
  XENP021821 vhCDR2
NIYPSDSYTNYNQMFKD

SEQ ID NO: 26316 - protein, 15 aa, Artificial Sequence
  Description of Artificial Sequence: Synthetic peptide
  XENP021821 vhCDR3
WNLSYYFDNNYYLDY

SEQ ID NO: 26317 - protein, 219 aa, Artificial Sequence
  Description of Artificial Sequence: Synthetic polypeptide
  XENP021821 GSK_88.2[ICOS]_H0L0_IgG1_PVA_/S267K Light Chain
DIVMTQAAPSVPVTPGESVSISCRSSKSLLHSNGNTYLYWFLQRPGQSPQLLIYRMSNLASGVPDRFSGSGSGTAFTLRISRVEAEDVGVYYCMQHLEYPWTFGGGTKLEIKRTVAAPSVFIFPPSDEQLKSGTASVVCLLNNFYPREAKVQWKVDNALQSGNSQESVTEQDSKDSTYSLSSTLTLSKADYEKHKVYACEVTHQGLSSPVTKSFNRGEC

SEQ ID NO: 26318 - protein, 112 aa, Artificial Sequence
  Description of Artificial Sequence: Synthetic polypeptide
  VL of XENP021821
DIVMTQAAPSVPVTPGESVSISCRSSKSLLHSNGNTYLYWFLQRPGQSPQLLIYRMSNLASGVPDRFSGSGSGTAFTLRISRVEAEDVGVYYCMQHLEYPWTFGGGTKLEIK

SEQ ID NO: 26319 - protein, 16 aa, Artificial Sequence
  Description of Artificial Sequence: Synthetic peptide
  XENP021821 vlCDR1
RSSKSLLHSNGNTYLY

SEQ ID NO: 26320 - protein, 7 aa, Artificial Sequence
  Description of Artificial Sequence: Synthetic peptide
  XENP021821 vlCDR2
RMSNLAS

SEQ ID NO: 26321 - protein, 9 aa, Artificial Sequence
  Description of Artificial Sequence: Synthetic peptide
  XENP021821 vlCDR3
MQHLEYPWT

SEQ ID NO: 26322 - protein, 454 aa, Artificial Sequence
  Description of Artificial Sequence: Synthetic polypeptide
  XENP021822 jMab-138[ICOS]_H0L0_IgG1_PVA_/S267K Heavy Chain
EVQLVESGGGLVQPGGSLRLSCAASGFTFSSYDMHWVRQATGKGLEWVSAIGTAGDTYYPGSVKGRFTISRENAKNSLYLQMNSLRAGDTAVYYCVRDNRKVTHEHYYYYGMDVWGQGTTVTVSSASTKGPSVFPLAPSSKSTSGGTAALGCLVKDYFPEPVTVSWNSGALTSGVHTFPAVLQSSGLYSLSSVVTVPSSSLGTQTYICNVNHKPSNTKVDKKVEPKSCDKTHTCPPCPAPPVAGPSVFLFPPKPKDTLMISRTPEVTCVVVDVKHEDPEVKFNWYVDGVEVHNAKTKPREEQYNSTYRVVSVLTVLHQDWLNGKEYKCKVSNKALPAPIEKTISKAKGQPREPQVYTLPPSREEMTKNQVSLTCLVKGFYPSDIAVEWESNGQPENNYKTTPPVLDSDGSFFLYSKLTVDKSRWQQGNVFSCSVMHEALHNHYTQKSLSLSPGK

SEQ ID NO: 26323 - protein, 125 aa, Artificial Sequence
  Description of Artificial Sequence: Synthetic polypeptide
  VH of XENP021822
EVQLVESGGGLVQPGGSLRLSCAASGFTFSSYDMHWVRQATGKGLEWVSAIGTAGDTYYPGSVKGRFTISRENAKNSLYLQMNSLRAGDTAVYYCVRDNRKVTHEHYYYYGMDVWGQGTTVTVSS

SEQ ID NO: 26324 - protein, 5 aa, Artificial Sequence
  Description of Artificial Sequence: Synthetic peptide
  XENP021822 vhCDR1
SYDMH

SEQ ID NO: 26325 - protein, 16 aa, Artificial Sequence
  Description of Artificial Sequence: Synthetic peptide
  XENP021822 vhCDR2
AIGTAGDTYYPGSVKG

SEQ ID NO: 26326 - protein, 17 aa, Artificial Sequence
  Description of Artificial Sequence: Synthetic peptide
  XENP021822 vhCDR3
DNRKVTHEHYYYYGMDV

SEQ ID NO: 26327 - protein, 216 aa, Artificial Sequence
  Description of Artificial Sequence: Synthetic polypeptide
  XENP021822 jMab-138[ICOS]_H0L0_IgG1_PVA_/S267K Light Chain
EIVLTQSPGTLSLSPGERATLSCRASQNIRSSYLAWYQQKPGQAPGLLIYGASSRATGIPDRFSGSGSGTDFTLTISRLEPEDFAVYYCQQFGSSPMCSFGQGTKLEIKRTVAAPSVFIFPPSDEQLKSGTASVVCLLNNFYPREAKVQWKVDNALQSGNSQESVTEQDSKDSTYSLSSTLTLSKADYEKHKVYACEVTHQGLSSPVTKSFNRGEC

SEQ ID NO: 26328 - protein, 109 aa, Artificial Sequence
  Description of Artificial Sequence: Synthetic polypeptide
  VL of XENP021822
EIVLTQSPGTLSLSPGERATLSCRASQNIRSSYLAWYQQKPGQAPGLLIYGASSRATGIPDRFSGSGSGTDFTLTISRLEPEDFAVYYCQQFGSSPMCSFGQGTKLEIK

SEQ ID NO: 26329 - protein, 12 aa, Artificial Sequence
  Description of Artificial Sequence: Synthetic peptide
  XENP021822 vlCDR1
RASQNIRSSYLA

SEQ ID NO: 26330 - protein, 7 aa, Artificial Sequence
  Description of Artificial Sequence: Synthetic peptide
  XENP021822 vlCDR2
GASSRAT

SEQ ID NO: 26331 - protein, 10 aa, Artificial Sequence
  Description of Artificial Sequence: Synthetic peptide
  XENP021822 vlCDR3
QQFGSSPMCS

SEQ ID NO: 26332 - protein, 454 aa, Artificial Sequence
  Description of Artificial Sequence: Synthetic polypeptide
  XENP021823 jMab-139[ICOS]_H0L0_IgG1_PVA_/S267K Heavy Chain
EVQLVESGGGLVQPGGSLRLSCAASGFTFSSYDMHWVRQATGKGLEWVSAIGTAGDTYYPGSVKGRFTISRENAKNSLYLQMNSLRAGDTAVYYCVRDKRTVTHEHYYYYGMDVWGQGTTVTVSSASTKGPSVFPLAPSSKSTSGGTAALGCLVKDYFPEPVTVSWNSGALTSGVHTFPAVLQSSGLYSLSSVVTVPSSSLGTQTYICNVNHKPSNTKVDKKVEPKSCDKTHTCPPCPAPPVAGPSVFLFPPKPKDTLMISRTPEVTCVVVDVKHEDPEVKFNWYVDGVEVHNAKTKPREEQYNSTYRVVSVLTVLHQDWLNGKEYKCKVSNKALPAPIEKTISKAKGQPREPQVYTLPPSREEMTKNQVSLTCLVKGFYPSDIAVEWESNGQPENNYKTTPPVLDSDGSFFLYSKLTVDKSRWQQGNVFSCSVMHEALHNHYTQKSLSLSPGK

SEQ ID NO: 26333 - protein, 125 aa, Artificial Sequence
  Description of Artificial Sequence: Synthetic polypeptide
  VH of XENP021823
EVQLVESGGGLVQPGGSLRLSCAASGFTFSSYDMHWVRQATGKGLEWVSAIGTAGDTYYPGSVKGRFTISRENAKNSLYLQMNSLRAGDTAVYYCVRDKRTVTHEHYYYYGMDVWGQGTTVTVSS

SEQ ID NO: 26334 - protein, 5 aa, Artificial Sequence
  Description of Artificial Sequence: Synthetic peptide
  XENP021823 vhCDR1
SYDMH

SEQ ID NO: 26335 - protein, 16 aa, Artificial Sequence
  Description of Artificial Sequence: Synthetic peptide
  XENP021823 vhCDR2
AIGTAGDTYYPGSVKG

SEQ ID NO: 26336 - protein, 17 aa, Artificial Sequence
  Description of Artificial Sequence: Synthetic peptide
  XENP021823 vhCDR3
DKRTVTHEHYYYYGMDV

SEQ ID NO: 26337 - protein, 216 aa, Artificial Sequence
  Description of Artificial Sequence: Synthetic polypeptide
  XENP021823 jMab-139[ICOS]_H0L0_IgG1_PVA_/S267K Light Chain
EIVLTQSPGTLSLSPGERATLSCRASQSISSSSLAWYQQKPGQAPGLLIFGASSRATGIPDRFSGSGSGTDFTLTISRLEPEDFAVYYCQQFGSSPMCSFGQGTKLEIKRTVAAPSVFIFPPSDEQLKSGTASVVCLLNNFYPREAKVQWKVDNALQSGNSQESVTEQDSKDSTYSLSSTLTLSKADYEKHKVYACEVTHQGLSSPVTKSFNRGEC

SEQ ID NO: 26338 - protein, 109 aa, Artificial Sequence
  Description of Artificial Sequence: Synthetic polypeptide
  VL of XENP021823
EIVLTQSPGTLSLSPGERATLSCRASQSISSSSLAWYQQKPGQAPGLLIFGASSRATGIPDRFSGSGSGTDFTLTISRLEPEDFAVYYCQQFGSSPMCSFGQGTKLEIK

SEQ ID NO: 26339 - protein, 12 aa, Artificial Sequence
  Description of Artificial Sequence: Synthetic peptide
  XENP021823 vlCDR1
RASQSISSSSLA

SEQ ID NO: 26340 - protein, 7 aa, Artificial Sequence
  Description of Artificial Sequence: Synthetic peptide
  XENP021823 vlCDR2
GASSRAT

SEQ ID NO: 26341 - protein, 10 aa, Artificial Sequence
  Description of Artificial Sequence: Synthetic peptide
  XENP021823 vlCDR3
QQFGSSPMCS

SEQ ID NO: 26342 - protein, 450 aa, Artificial Sequence
  Description of Artificial Sequence: Synthetic polypeptide
  XENP022346 WO2016059602_GSK[ICOS]_H0L0_IgG1_PVA_/S267K Heavy Chain
QVQLVQSGAEVKKPGSSVKVSCKASGYTFTDYAMHWVRQAPGQGLEWMGLISIYSDHTNYNQKFQGRVTITADKSTSTAYMELSSLRSEDTAVYYCGRNNYGNYGWYFDVWGQGTTVTVSSASTKGPSVFPLAPSSKSTSGGTAALGCLVKDYFPEPVTVSWNSGALTSGVHTFPAVLQSSGLYSLSSVVTVPSSSLGTQTYICNVNHKPSNTKVDKKVEPKSCDKTHTCPPCPAPPVAGPSVFLFPPKPKDTLMISRTPEVTCVVVDVKHEDPEVKFNWYVDGVEVHNAKTKPREEQYNSTYRVVSVLTVLHQDWLNGKEYKCKVSNKALPAPIEKTISKAKGQPREPQVYTLPPSREEMTKNQVSLTCLVKGFYPSDIAVEWESNGQPENNYKTTPPVLDSDGSFFLYSKLTVDKSRWQQGNVFSCSVMHEALHNHYTQKSLSLSPGK

SEQ ID NO: 26343 - protein, 121 aa, Artificial Sequence
  Description of Artificial Sequence: Synthetic polypeptide
  VH of XENP022346
QVQLVQSGAEVKKPGSSVKVSCKASGYTFTDYAMHWVRQAPGQGLEWMGLISIYSDHTNYNQKFQGRVTITADKSTSTAYMELSSLRSEDTAVYYCGRNNYGNYGWYFDVWGQGTTVTVSS

SEQ ID NO: 26344 - protein, 5 aa, Artificial Sequence
  Description of Artificial Sequence: Synthetic peptide
  XENP022346 vhCDR1
DYAMH

SEQ ID NO: 26345 - protein, 17 aa, Artificial Sequence
  Description of Artificial Sequence: Synthetic peptide
  XENP022346 vhCDR2
LISIYSDHTNYNQKFQG

SEQ ID NO: 26346 - protein, 12 aa, Artificial Sequence
  Description of Artificial Sequence: Synthetic peptide
  XENP022346 vhCDR3
NNYGNYGWYFDV

SEQ ID NO: 26347 - protein, 213 aa, Artificial Sequence
  Description of Artificial Sequence: Synthetic polypeptide
  XENP022346 WO2016059602_GSK[ICOS]_H0L0_IgG1_PVA_/S267K Light Chain
EIVLTQSPATLSLSPGERATLSCSASSSVSYMHWYQQKPGQAPRLLIYDTSKLASGIPARFSGSGSGTDYTLTISSLEPEDFAVYYCFQGSGYPYTFGQGTKLEIKRTVAAPSVFIFPPSDEQLKSGTASVVCLLNNFYPREAKVQWKVDNALQSGNSQESVTEQDSKDSTYSLSSTLTLSKADYEKHKVYACEVTHQGLSSPVTKSFNRGEC

SEQ ID NO: 26348 - protein, 106 aa, Artificial Sequence
  Description of Artificial Sequence: Synthetic polypeptide
  VL of XENP022346
EIVLTQSPATLSLSPGERATLSCSASSSVSYMHWYQQKPGQAPRLLIYDTSKLASGIPARFSGSGSGTDYTLTISSLEPEDFAVYYCFQGSGYPYTFGQGTKLEIK

SEQ ID NO: 26349 - protein, 10 aa, Artificial Sequence
  Description of Artificial Sequence: Synthetic peptide
  XENP022346 vlCDR1
SASSSVSYMH

SEQ ID NO: 26350 - protein, 7 aa, Artificial Sequence
  Description of Artificial Sequence: Synthetic peptide
  XENP022346 vlCDR2
DTSKLAS

SEQ ID NO: 26351 - protein, 9 aa, Artificial Sequence
  Description of Artificial Sequence: Synthetic peptide
  XENP022346 vlCDR3
FQGSGYPYT

SEQ ID NO: 26352 - protein, 446 aa, Artificial Sequence
  Description of Artificial Sequence: Synthetic polypeptide
  XENP023057 Jounce_37A10S713[ICOS]_H0L0_IgG1_PVA_/S267K Heavy Chain
EVQLVESGGGLVQPGGSLRLSCAASGFTFSDYWMDWVRQAPGKGLVWVSNIDEDGSITEYSPFVKGRFTISRDNAKNTLYLQMNSLRAEDTAVYYCTRWGRFGFDSWGQGTLVTVSSASTKGPSVFPLAPSSKSTSGGTAALGCLVKDYFPEPVTVSWNSGALTSGVHTFPAVLQSSGLYSLSSVVTVPSSSLGTQTYICNVNHKPSNTKVDKKVEPKSCDKTHTCPPCPAPPVAGPSVFLFPPKPKDTLMISRTPEVTCVVVDVKHEDPEVKFNWYVDGVEVHNAKTKPREEQYNSTYRVVSVLTVLHQDWLNGKEYKCKVSNKALPAPIEKTISKAKGQPREPQVYTLPPSREEMTKNQVSLTCLVKGFYPSDIAVEWESNGQPENNYKTTPPVLDSDGSFFLYSKLTVDKSRWQQGNVFSCSVMHEALHNHYTQKSLSLSPGK

SEQ ID NO: 26353 - protein, 117 aa, Artificial Sequence
  Description of Artificial Sequence: Synthetic polypeptide
  VH of XENP023057
EVQLVESGGGLVQPGGSLRLSCAASGFTFSDYWMDWVRQAPGKGLVWVSNIDEDGSITEYSPFVKGRFTISRDNAKNTLYLQMNSLRAEDTAVYYCTRWGRFGFDSWGQGTLVTVSS

SEQ ID NO: 26354 - protein, 5 aa, Artificial Sequence
  Description of Artificial Sequence: Synthetic peptide
  XENP023057 vhCDR1
DYWMD

SEQ ID NO: 26355 - protein, 17 aa, Artificial Sequence
  Description of Artificial Sequence: Synthetic peptide
  XENP023057 vhCDR2
NIDEDGSITEYSPFVKG

SEQ ID NO: 26356 - protein, 8 aa, Artificial Sequence
  Description of Artificial Sequence: Synthetic peptide
  XENP023057 vhCDR3
WGRFGFDS

SEQ ID NO: 26357 - protein, 218 aa, Artificial Sequence
  Description of Artificial Sequence: Synthetic polypeptide
  XENP023057 Jounce_37A10S713[ICOS]_H0L0_IgG1_PVA_/S267K Light Chain
DIVMTQSPDSLAVSLGERATINCKSSQSLLSGSFNYLTWYQQKPGQPPKLLIFYASTRHTGVPDRFSGSGSGTDFTLTISSLQAEDVAVYYCHHHYNAPPTFGPGTKVDIKRTVAAPSVFIFPPSDEQLKSGTASVVCLLNNFYPREAKVQWKVDNALQSGNSQESVTEQDSKDSTYSLSSTLTLSKADYEKHKVYACEVTHQGLSSPVTKSFNRGEC

SEQ ID NO: 26358 - protein, 111 aa, Artificial Sequence
  Description of Artificial Sequence: Synthetic polypeptide
  VL of XENP023057
DIVMTQSPDSLAVSLGERATINCKSSQSLLSGSFNYLTWYQQKPGQPPKLLIFYASTRHTGVPDRFSGSGSGTDFTLTISSLQAEDVAVYYCHHHYNAPPTFGPGTKVDIK

SEQ ID NO: 26359 - protein, 15 aa, Artificial Sequence
  Description of Artificial Sequence: Synthetic peptide
  XENP023057 vlCDR1
KSSQSLLSGSFNYLT

SEQ ID NO: 26360 - protein, 7 aa, Artificial Sequence
  Description of Artificial Sequence: Synthetic peptide
  XENP023057 vlCDR2
YASTRHT

SEQ ID NO: 26361 - protein, 9 aa, Artificial Sequence
  Description of Artificial Sequence: Synthetic peptide
  XENP023057 vlCDR3
HHHYNAPPT

SEQ ID NO: 26362 - protein, 454 aa, Artificial Sequence
  Description of Artificial Sequence: Synthetic polypeptide
  XENP022730 [ICOS]_H0L0_Fab-1G6_L1.194_H1.279 Fab-Fc Heavy Chain
QVQLVQSGAEVKKPGASVKVSCKASGYTFTGYYMHWVRQAPGQGLEWMGWINPHSGGTNYAQKFQGRVTMTRDTSISTAYMELSRLRSDDTAVYYCARTYYYDSSGYYHDAFDIWGQGTMVTVSSASTKGPSVFPLAPSSKSTSGGTAALGCLVKDYFPEPVTVSWNSGALTSGVHTFPAVLQSSGLYSLSSVVTVPSSSLGTQTYICNVNHKPSDTKVDKKVEPKSCDKTHTCPPCPAPPVAGPSVFLFPPKPKDTLMISRTPEVTCVVVDVKHEDPEVKFNWYVDGVEVHNAKTKPREEEYNSTYRVVSVLTVLHQDWLNGKEYKCKVSNKALPAPIEKTISKAKGQPREPQVYTLPPSREEMTKNQVSLTCDVSGFYPSDIAVEWESDGQPENNYKTTPPVLDSDGSFFLYSKLTVDKSRWEQGDVFSCSVLHEALHSHYTQKSLSLSPGK

SEQ ID NO: 26363 - protein, 125 aa, Artificial Sequence; identical to SEQ ID NO: 26293
  Description of Artificial Sequence: Synthetic polypeptide
  VH of XENP022730

SEQ ID NO: 26364 - protein, 5 aa, Artificial Sequence
  Description of Artificial Sequence: Synthetic peptide
  XENP022730 vhCDR1
GYYMH

SEQ ID NO: 26365 - protein, 17 aa, Artificial Sequence
  Description of Artificial Sequence: Synthetic peptide
  XENP022730 vhCDR2
WINPHSGGTNYAQKFQG

SEQ ID NO: 26366 - protein, 16 aa, Artificial Sequence
  Description of Artificial Sequence: Synthetic peptide
  XENP022730 vhCDR3
TYYYDSSGYYHDAFDI

SEQ ID NO: 26367 - protein, 480 aa, Artificial Sequence; identical to SEQ ID NO: 2930
  Description of Artificial Sequence: Synthetic polypeptide
  XENP022730 [ICOS]_H0L0_Fab-1G6_L1.194_H1.279 scFv-Fc Heavy Chain

SEQ ID NO: 26368 - protein, 107 aa, Artificial Sequence; identical to SEQ ID NO: 2871
  Description of Artificial Sequence: Synthetic polypeptide
  VH of XENP022730

SEQ ID NO: 26369 - protein, 122 aa, Artificial Sequence; identical to SEQ ID NO: 2872
  Description of Artificial Sequence: Synthetic polypeptide
  VL of XENP022730

SEQ ID NO: 26370 - protein, 231 aa, Artificial Sequence; identical to SEQ ID NO: 2409
  Description of Artificial Sequence: Synthetic polypeptide
  Fc chain of XENP022730

SEQ ID NO: 26371 - protein, 11 aa, Artificial Sequence
  Description of Artificial Sequence: Synthetic peptide
  XENP022730 vhCDR1
RASQSVGNDVA

SEQ ID NO: 26372 - protein, 7 aa, Artificial Sequence
  Description of Artificial Sequence: Synthetic peptide
  XENP022730 vhCDR2
YASHRYT

SEQ ID NO: 26373 - protein, 9 aa, Artificial Sequence
  Description of Artificial Sequence: Synthetic peptide
  XENP022730 vhCDR3
QQDFSSPRT

SEQ ID NO: 26374 - protein, 5 aa, Artificial Sequence
  Description of Artificial Sequence: Synthetic peptide
  XENP022730 vlCDR1
NYWMN

SEQ ID NO: 26375 - protein, 19 aa, Artificial Sequence
  Description of Artificial Sequence: Synthetic peptide
  XENP022730 vlCDR2
EIRLYSNNYATHYAESVKG

SEQ ID NO: 26376 - protein, 11 aa, Artificial Sequence
  Description of Artificial Sequence: Synthetic peptide
  XENP022730 vlCDR3
YYGNYGGYFDV

SEQ ID NO: 26377 - protein, 214 aa, Artificial Sequence; identical to SEQ ID NO: 26297
  Description of Artificial Sequence: Synthetic polypeptide
  XENP022730 [ICOS]_H0L0_Fab-1G6_L1.194_H1.279 Light Chain

SEQ ID NO: 26378 - protein, 107 aa, Artificial Sequence; identical to SEQ ID NO: 26298
  Description of Artificial Sequence: Synthetic polypeptide
  VL of XENP022730

SEQ ID NO: 26379 - protein, 11 aa, Artificial Sequence
  Description of Artificial Sequence: Synthetic peptide
  XENP022730 vlCDR1
RASQGISRLLA

SEQ ID NO: 26380 - protein, 7 aa, Artificial Sequence
  Description of Artificial Sequence: Synthetic peptide
  XENP022730 vlCDR2
VASSLQS

SEQ ID NO: 26381 - protein, 9 aa, Artificial Sequence
  Description of Artificial Sequence: Synthetic peptide
  XENP022730 vlCDR3
QQANSFPWT

SEQ ID NO: 26382 - protein, 447 aa, Artificial Sequence
  Description of Artificial Sequence: Synthetic polypeptide
  XENP023377 11D4[OX40]_H0L0_Fab-1G6_L1.194_H1.279_scFv Fab-Fc Heavy Chain
EVQLVESGGGLVQPGGSLRLSCAASGFTFSSYSMNWVRQAPGKGLEWVSYISSSSSTIDYADSVKGRFTISRDNAKNSLYLQMNSLRDEDTAVYYCARESGWYLFDYWGQGTLVTVSSASTKGPSVFPLAPSSKSTSGGTAALGCLVKDYFPEPVTVSWNSGALTSGVHTFPAVLQSSGLYSLSSVVTVPSSSLGTQTYICNVNHKPSDTKVDKKVEPKSCDKTHTCPPCPAPPVAGPSVFLFPPKPKDTLMISRTPEVTCVVVDVKHEDPEVKFNWYVDGVEVHNAKTKPREEEYNSTYRVVSVLTVLHQDWLNGKEYKCKVSNKALPAPIEKTISKAKGQPREPQVYTLPPSREEMTKNQVSLTCDVSGFYPSDIAVEWESDGQPENNYKTTPPVLDSDGSFFLYSKLTVDKSRWEQGDVFSCSVMHEALHNHYTQKSLSLSPGK

SEQ ID NO: 26383 - protein, 118 aa, Artificial Sequence; identical to SEQ ID NO: 26273
  Description of Artificial Sequence: Synthetic polypeptide
  VH of XENP023377

SEQ ID NO: 26384 - protein, 5 aa, Artificial Sequence
  Description of Artificial Sequence: Synthetic peptide
  XENP023377 vhCDR1
SYSMN

SEQ ID NO: 26385 - protein, 11 aa, Artificial Sequence
  Description of Artificial Sequence: Synthetic peptide
  XENP023377 vhCDR2
YISSSSSTIDY

SEQ ID NO: 26386 - protein, 9 aa, Artificial Sequence
  Description of Artificial Sequence: Synthetic peptide
  XENP023377 vhCDR3
ESGWYLFDY

SEQ ID NO: 26387 - protein, 480 aa, Artificial Sequence; identical to SEQ ID NO: 2870
  Description of Artificial Sequence: Synthetic polypeptide
  XENP023377 11D4[OX40]_H0L0_Fab-1G6_L1.194_H1.279_scFv scFv-Fc Heavy Chain

SEQ ID NO: 26388 - protein, 107 aa, Artificial Sequence; identical to SEQ ID NO: 2871
  Description of Artificial Sequence: Synthetic polypeptide
  VH of XENP023377

SEQ ID NO: 26389 - protein, 122 aa, Artificial Sequence; identical to SEQ ID NO: 2872
  Description of Artificial Sequence: Synthetic polypeptide
  VL of XENP023377

SEQ ID NO: 26390 - protein, 231 aa, Artificial Sequence; identical to SEQ ID NO: 2397
  Description of Artificial Sequence: Synthetic polypeptide
  Fc chain of XENP023377

SEQ ID NO: 26391 - protein, 11 aa, Artificial Sequence
  Description of Artificial Sequence: Synthetic peptide
  XENP023377 vhCDR1
RASQSVGNDVA

SEQ ID NO: 26392 - protein, 7 aa, Artificial Sequence
  Description of Artificial Sequence: Synthetic peptide
  XENP023377 vhCDR2
YASHRYT

SEQ ID NO: 26393 - protein, 9 aa, Artificial Sequence
  Description of Artificial Sequence: Synthetic peptide
  XENP023377 vhCDR3
QQDFSSPRT

SEQ ID NO: 26394 - protein, 5 aa, Artificial Sequence
  Description of Artificial Sequence: Synthetic peptide
  XENP023377 vlCDR1
NYWMN

SEQ ID NO: 26395 - protein, 19 aa, Artificial Sequence
  Description of Artificial Sequence: Synthetic peptide
  XENP023377 vlCDR2
EIRLYSNNYATHYAESVKG

SEQ ID NO: 26396 - protein, 11 aa, Artificial Sequence
  Description of Artificial Sequence: Synthetic peptide
  XENP023377 vlCDR3
YYGNYGGYFDV

SEQ ID NO: 26397 - protein, 214 aa, Artificial Sequence; identical to SEQ ID NO: 26277
  Description of Artificial Sequence: Synthetic polypeptide
  XENP023377 11D4[OX40]_H0L0_Fab-1G6_L1.194_H1.279_scFv Light Chain

SEQ ID NO: 26398 - protein, 107 aa, Artificial Sequence; identical to SEQ ID NO: 26278
  Description of Artificial Sequence: Synthetic polypeptide
  VL of XENP023377

SEQ ID NO: 26399 - protein, 11 aa, Artificial Sequence
  Description of Artificial Sequence: Synthetic peptide
  XENP023377 vlCDR1
RASQGISSWLA

SEQ ID NO: 26400 - protein, 7 aa, Artificial Sequence
  Description of Artificial Sequence: Synthetic peptide
  XENP023377 vlCDR2
AASSLQS

SEQ ID NO: 26401 - protein, 9 aa, Artificial Sequence
  Description of Artificial Sequence: Synthetic peptide
  XENP023377 vlCDR3
QQYNSYPPT

SEQ ID NO: 26402 - protein, 451 aa, Artificial Sequence
  Description of Artificial Sequence: Synthetic polypeptide
  XENP023378 1D8[GITR]_H0L0_Fab-1G6_L1.194_H1.279_scFv Fab-Fc Heavy Chain
QVTLKESGPGILKPSQTLSLTCSFSGFSLSTSGMGVGWIRQPSGKGLEWLAHIWWDDDKYYSPSLKSQLTISKDTSRNQVFLKITSLDTADTATYYCVRSYYYGSSGAMDYWGQGTSVTVSSASTKGPSVFPLAPSSKSTSGGTAALGCLVKDYFPEPVTVSWNSGALTSGVHTFPAVLQSSGLYSLSSVVTVPSSSLGTQTYICNVNHKPSDTKVDKKVEPKSCDKTHTCPPCPAPPVAGPSVFLFPPKPKDTLMISRTPEVTCVVVDVKHEDPEVKFNWYVDGVEVHNAKTKPREEEYNSTYRVVSVLTVLHQDWLNGKEYKCKVSNKALPAPIEKTISKAKGQPREPQVYTLPPSREEMTKNQVSLTCDVSGFYPSDIAVEWESDGQPENNYKTTPPVLDSDGSFFLYSKLTVDKSRWEQGDVFSCSVMHEALHNHYTQKSLSLSPGK

SEQ ID NO: 26403 - protein, 122 aa, Artificial Sequence; identical to SEQ ID NO: 26283
  Description of Artificial Sequence: Synthetic polypeptide
  VH of XENP023378

SEQ ID NO: 26404 - protein, 7 aa, Artificial Sequence
  Description of Artificial Sequence: Synthetic peptide
  XENP023378 vhCDR1
TSGMGVG

SEQ ID NO: 26405 - protein, 9 aa, Artificial Sequence
  Description of Artificial Sequence: Synthetic peptide
  XENP023378 vhCDR2
HIWWDDDKY

SEQ ID NO: 26406 - protein, 12 aa, Artificial Sequence
  Description of Artificial Sequence: Synthetic peptide
  XENP023378 vhCDR3
SYYYGSSGAMDY

SEQ ID NO: 26407 - protein, 480 aa, Artificial Sequence; identical to SEQ ID NO: 2870
  Description of Artificial Sequence: Synthetic polypeptide
  XENP023378 1D8[GITR]_H0L0_Fab-1G6_L1.194_H1.279_scFv scFv-Fc Heavy Chain

SEQ ID NO: 26408 - protein, 107 aa, Artificial Sequence; identical to SEQ ID NO: 2871
  Description of Artificial Sequence: Synthetic polypeptide
  VH of XENP023378

SEQ ID NO: 26409 - protein, 122 aa, Artificial Sequence; identical to SEQ ID NO: 2872
  Description of Artificial Sequence: Synthetic polypeptide
  VL of XENP023378

SEQ ID NO: 26410 - protein, 231 aa, Artificial Sequence; identical to SEQ ID NO: 2397
  Description of Artificial Sequence: Synthetic polypeptide
  Fc chain of XENP023378

SEQ ID NO: 26411 - protein, 11 aa, Artificial Sequence
  Description of Artificial Sequence: Synthetic peptide
  XENP023378 vhCDR1
RASQSVGNDVA

SEQ ID NO: 26412 - protein, 7 aa, Artificial Sequence
  Description of Artificial Sequence: Synthetic peptide
  XENP023378 vhCDR2
YASHRYT

SEQ ID NO: 26413 - protein, 9 aa, Artificial Sequence
  Description of Artificial Sequence: Synthetic peptide
  XENP023378 vhCDR3
QQDFSSPRT

SEQ ID NO: 26414 - protein, 5 aa, Artificial Sequence
  Description of Artificial Sequence: Synthetic peptide
  XENP023378 vlCDR1
NYWMN

SEQ ID NO: 26415 - protein, 19 aa, Artificial Sequence
  Description of Artificial Sequence: Synthetic peptide
  XENP023378 vlCDR2
EIRLYSNNYATHYAESVKG

SEQ ID NO: 26416 - protein, 11 aa, Artificial Sequence
  Description of Artificial Sequence: Synthetic peptide
  XENP023378 vlCDR3
YYGNYGGYFDV

SEQ ID NO: 26417 - protein, 219 aa, Artificial Sequence; identical to SEQ ID NO: 26287
  Description of Artificial Sequence: Synthetic polypeptide
  XENP023378 1D8[GITR]_H0L0_Fab-1G6_L1.194_H1.279_scFv Light Chain

SEQ ID NO: 26418 - protein, 112 aa, Artificial Sequence; identical to SEQ ID NO: 26288
  Description of Artificial Sequence: Synthetic polypeptide
  VL of XENP023378

SEQ ID NO: 26419 - protein, 16 aa, Artificial Sequence
  Description of Artificial Sequence: Synthetic peptide
  XENP023378 vlCDR1
RSSQSLVHSDGNTYLH

SEQ ID NO: 26420 - protein, 6 aa, Artificial Sequence
  Description of Artificial Sequence: Synthetic peptide
  XENP023378 vlCDR2
KVSKRF

SEQ ID NO: 26421 - protein, 9 aa, Artificial Sequence
  Description of Artificial Sequence: Synthetic peptide
  XENP023378 vlCDR3
SQSTHVPPT

SEQ ID NO: 26422 - protein, 450 aa, Artificial Sequence
  Description of Artificial Sequence: Synthetic polypeptide
  XENP023379 20H4.9[4-1BB]_H0L0_Fab-1G6_L1.194_H1.279_scFv Fab-Fc Heavy Chain
QVQLQQWGAGLLKPSETLSLTCAVYGGSFSGYYWSWIRQSPEKGLEWIGEINHGGYVTYNPSLESRVTISVDTSKNQFSLKLSSVTAADTAVYYCARDYGPGNYDWYFDLWGRGTLVTVSSASTKGPSVFPLAPSSKSTSGGTAALGCLVKDYFPEPVTVSWNSGALTSGVHTFPAVLQSSGLYSLSSVVTVPSSSLGTQTYICNVNHKPSDTKVDKKVEPKSCDKTHTCPPCPAPPVAGPSVFLFPPKPKDTLMISRTPEVTCVVVDVKHEDPEVKFNWYVDGVEVHNAKTKPREEEYNSTYRVVSVLTVLHQDWLNGKEYKCKVSNKALPAPIEKTISKAKGQPREPQVYTLPPSREEMTKNQVSLTCDVSGFYPSDIAVEWESDGQPENNYKTTPPVLDSDGSFFLYSKLTVDKSRWEQGDVFSCSVMHEALHNHYTQKSLSLSPGK

SEQ ID NO: 26423 - protein, 121 aa, Artificial Sequence [sequence omitted]

SEQ ID NO: 26424 - protein, 5 aa, Artificial Sequence
  Description of Artificial Sequence: Synthetic peptide
  XENP023379 vhCDR1
GYYWS

SEQ ID NO: 26425 - protein, 11 aa, Artificial Sequence
  Description of Artificial Sequence: Synthetic peptide
  XENP023379 vhCDR2
EINHGGYVTYN

SEQ ID NO: 26426 - protein, 13 aa, Artificial Sequence
  Description of Artificial Sequence: Synthetic peptide
  XENP023379 vhCDR3
DYGPGNYDWYFDL

SEQ ID NO: 26427 - protein, 480 aa, Artificial Sequence; identical to SEQ ID NO: 2870
  Description of Artificial Sequence: Synthetic polypeptide
  XENP023379 20H4.9[4-1BB]_H0L0_Fab-1G6_L1.194_H1.279_scFv scFv-Fc Heavy Chain

SEQ ID NO: 26428 - protein, 107 aa, Artificial Sequence; identical to SEQ ID NO: 2871
  Description of Artificial Sequence: Synthetic polypeptide
  VH of XENP023379

SEQ ID NO: 26429 - protein, 122 aa, Artificial Sequence; identical to SEQ ID NO: 2872
  Description of Artificial Sequence: Synthetic polypeptide
  VL of XENP023379

SEQ ID NO: 26430 - protein, 231 aa, Artificial Sequence; identical to SEQ ID NO: 2397
  Description of Artificial Sequence: Synthetic polypeptide
  Fc chain of XENP023379

SEQ ID NO: 26431 - protein, 11 aa, Artificial Sequence
  Description of Artificial Sequence: Synthetic peptide
  XENP023379 vhCDR1
RASQSVGNDVA

SEQ ID NO: 26432 - protein, 7 aa, Artificial Sequence
  Description of Artificial Sequence: Synthetic peptide
  XENP023379 vhCDR2
YASHRYT

SEQ ID NO: 26433 - protein, 9 aa, Artificial Sequence
  Description of Artificial Sequence: Synthetic peptide
  XENP023379 vhCDR3
QQDFSSPRT

SEQ ID NO: 26434 - protein, 5 aa, Artificial Sequence
  Description of Artificial Sequence: Synthetic peptide
  XENP023379 vlCDR1
NYWMN

SEQ ID NO: 26435 - protein, 19 aa, Artificial Sequence
  Description of Artificial Sequence: Synthetic peptide
  XENP023379 vlCDR2
EIRLYSNNYATHYAESVKG

SEQ ID NO: 26436 - protein, 11 aa, Artificial Sequence
  Description of Artificial Sequence: Synthetic peptide
  XENP023379 vlCDR3
YYGNYGGYFDV

SEQ ID NO: 26437 - protein, 216 aa, Artificial Sequence; identical to SEQ ID NO: 26267
  Description of Artificial Sequence: Synthetic polypeptide
  XENP023379 20H4.9[4-1BB]_H0L0_Fab-1G6_L1.194_H1.279_scFv Light Chain

SEQ ID NO: 26438 - protein, 109 aa, Artificial Sequence [sequence omitted]

SEQ ID NO: 26439 - protein, 11 aa, Artificial Sequence
  Description of Artificial Sequence: Synthetic peptide
  XENP023379 vlCDR1
RASQSVSSYLA

SEQ ID NO: 26440 - protein, 7 aa, Artificial Sequence
  Description of Artificial Sequence: Synthetic peptide
  XENP023379 vlCDR2
DASNRAT

SEQ ID NO: 26441 - protein, 11 aa, Artificial Sequence
  Description of Artificial Sequence: Synthetic peptide
  XENP023379 vlCDR3
QQRSNWPPALT

SEQ ID NO: 26442 - protein, 454 aa, Artificial Sequence
  Description of Artificial Sequence: Synthetic polypeptide
  XENP020896 [ICOS]_H0L0_Fab-1G6_L1.194_H1.279 Fab-Fc Heavy Chain
QVQLVQSGAEVKKPGASVKVSCKASGYTFTGYYMHWVRQAPGQGLEWMGWINPHSGGTNYAQKFQGRVTMTRDTSISTAYMELSRLRSDDTAVYYCARTYYYDSSGYYHDAFDIWGQGTMVTVSSASTKGPSVFPLAPSSKSTSGGTAALGCLVKDYFPEPVTVSWNSGALTSGVHTFPAVLQSSGLYSLSSVVTVPSSSLGTQTYICNVNHKPSDTKVDKKVEPKSCDKTHTCPPCPAPPVAGPSVFLFPPKPKDTLMISRTPEVTCVVVDVKHEDPEVKFNWYVDGVEVHNAKTKPREEEYNSTYRVVSVLTVLHQDWLNGKEYKCKVSNKALPAPIEKTISKAKGQPREPQVYTLPPSREEMTKNQVSLTCDVSGFYPSDIAVEWESDGQPENNYKTTPPVLDSDGSFFLYSKLTVDKSRWEQGDVFSCSVMHEALHNHYTQKSLSLSPGK

SEQ ID NO: 26443 - protein, 125 aa, Artificial Sequence; identical to SEQ ID NO: 26293
  Description of Artificial Sequence: Synthetic polypeptide
  VH of XENP020896

SEQ ID NO: 26444 - protein, 5 aa, Artificial Sequence
  Description of Artificial Sequence: Synthetic peptide
  XENP020896 vhCDR1
GYYMH

SEQ ID NO: 26445 - protein, 17 aa, Artificial Sequence
  Description of Artificial Sequence: Synthetic peptide
  XENP020896 vhCDR2
WINPHSGGTNYAQKFQG

SEQ ID NO: 26446 - protein, 16 aa, Artificial Sequence
  Description of Artificial Sequence: Synthetic peptide
  XENP020896 vhCDR3
TYYYDSSGYYHDAFDI

SEQ ID NO: 26447 - protein, 480 aa, Artificial Sequence; identical to SEQ ID NO: 2870
  Description of Artificial Sequence: Synthetic polypeptide
  XENP020896 [ICOS]_H0L0_Fab-1G6_L1.194_H1.279 scFv-Fc Heavy Chain

SEQ ID NO: 26448 - protein, 107 aa, Artificial Sequence; identical to SEQ ID NO: 2871
  Description of Artificial Sequence: Synthetic polypeptide
  VH of XENP020896

SEQ ID NO: 26449 - protein, 122 aa, Artificial Sequence; identical to SEQ ID NO: 2872
  Description of Artificial Sequence: Synthetic polypeptide
  VL of XENP020896

SEQ ID NO: 26450 - protein, 231 aa, Artificial Sequence; identical to SEQ ID NO: 2397
  Description of Artificial Sequence: Synthetic polypeptide
  Fc chain of XENP020896

SEQ ID NO: 26451 - protein, 11 aa, Artificial Sequence
  Description of Artificial Sequence: Synthetic peptide
  XENP020896 vhCDR1
RASQSVGNDVA

SEQ ID NO: 26452 - protein, 7 aa, Artificial Sequence
  Description of Artificial Sequence: Synthetic peptide
  XENP020896 vhCDR2
YASHRYT

SEQ ID NO: 26453 - protein, 9 aa, Artificial Sequence
  Description of Artificial Sequence: Synthetic peptide
  XENP020896 vhCDR3
QQDFSSPRT

SEQ ID NO: 26454 - protein, 5 aa, Artificial Sequence
  Description of Artificial Sequence: Synthetic peptide
  XENP020896 vlCDR1
NYWMN

SEQ ID NO: 26455 - protein, 19 aa, Artificial Sequence
  Description of Artificial Sequence: Synthetic peptide
  XENP020896 vlCDR2
EIRLYSNNYATHYAESVKG

SEQ ID NO: 26456 - protein, 11 aa, Artificial Sequence
  Description of Artificial Sequence: Synthetic peptide
  XENP020896 vlCDR3
YYGNYGGYFDV

SEQ ID NO: 26457 - protein, 214 aa, Artificial Sequence; identical to SEQ ID NO: 26297
  Description of Artificial Sequence: Synthetic polypeptide
  XENP020896 [ICOS]_H0L0_Fab-1G6_L1.194_H1.279 Light Chain

SEQ ID NO: 26458 - protein, 107 aa, Artificial Sequence; identical to SEQ ID NO: 26298
  Description of Artificial Sequence: Synthetic polypeptide
  VL of XENP020896

SEQ ID NO: 26459 - protein, 11 aa, Artificial Sequence
  Description of Artificial Sequence: Synthetic peptide
  XENP020896 vlCDR1
RASQGISRLLA

SEQ ID NO: 26460 - protein, 7 aa, Artificial Sequence
  Description of Artificial Sequence: Synthetic peptide
  XENP020896 vlCDR2
VASSLQS

SEQ ID NO: 26461 - protein, 9 aa, Artificial Sequence
  Description of Artificial Sequence: Synthetic peptide
  XENP020896 vlCDR3
QQANSFPWT

SEQ ID NO: 26462 - protein, 454 aa, Artificial Sequence; identical to SEQ ID NO: 26442
  Description of Artificial Sequence: Synthetic polypeptide
  XENP022433 [ICOS]_H0_L0.7_Fab-1G6_L1.194_H1.279 Fab-Fc Heavy Chain

SEQ ID NO: 26463 - protein, 125 aa, Artificial Sequence; identical to SEQ ID NO: 26293
  Description of Artificial Sequence: Synthetic polypeptide
  VH of XENP022433

SEQ ID NO: 26464 - protein, 5 aa, Artificial Sequence
  Description of Artificial Sequence: Synthetic peptide
  XENP022433 vhCDR1
GYYMH

SEQ ID NO: 26465 - protein, 17 aa, Artificial Sequence
  Description of Artificial Sequence: Synthetic peptide
  XENP022433 vhCDR2
WINPHSGGTNYAQKFQG

SEQ ID NO: 26466 - protein, 16 aa, Artificial Sequence
  Description of Artificial Sequence: Synthetic peptide
  XENP022433 vhCDR3
TYYYDSSGYYHDAFDI

SEQ ID NO: 26467 - protein, 480 aa, Artificial Sequence; identical to SEQ ID NO: 2870
  Description of Artificial Sequence: Synthetic polypeptide
  XENP022433 [ICOS]_H0_L0.7_Fab-1G6_L1.194_H1.279 scFv-Fc Heavy Chain

SEQ ID NO: 26468 - protein, 107 aa, Artificial Sequence; identical to SEQ ID NO: 2871
  Description of Artificial Sequence: Synthetic polypeptide
  VH of XENP022433

SEQ ID NO: 26469 - protein, 122 aa, Artificial Sequence; identical to SEQ ID NO: 2872
  Description of Artificial Sequence: Synthetic polypeptide
  VL of XENP022433

SEQ ID NO: 26470 - protein, 231 aa, Artificial Sequence; identical to SEQ ID NO: 2397
  Description of Artificial Sequence: Synthetic polypeptide
  Fc chain of XENP022433

SEQ ID NO: 26471 - protein, 11 aa, Artificial Sequence
  Description of Artificial Sequence: Synthetic peptide
  XENP022433 vhCDR1
RASQSVGNDVA

SEQ ID NO: 26472 - protein, 7 aa, Artificial Sequence
  Description of Artificial Sequence: Synthetic peptide
  XENP022433 vhCDR2
YASHRYT

SEQ ID NO: 26473 - protein, 9 aa, Artificial Sequence
  Description of Artificial Sequence: Synthetic peptide
  XENP022433 vhCDR3
QQDFSSPRT

SEQ ID NO: 26474 - protein, 5 aa, Artificial Sequence
  Description of Artificial Sequence: Synthetic peptide
  XENP022433 vlCDR1
NYWMN

SEQ ID NO: 26475 - protein, 19 aa, Artificial Sequence
  Description of Artificial Sequence: Synthetic peptide
  XENP022433 vlCDR2
EIRLYSNNYATHYAESVKG

SEQ ID NO: 26476 - protein, 11 aa, Artificial Sequence
  Description of Artificial Sequence: Synthetic peptide
  XENP022433 vlCDR3
YYGNYGGYFDV

SEQ ID NO: 26477 - protein, 214 aa, Artificial Sequence
  Description of Artificial Sequence: Synthetic polypeptide
  XENP022433 [ICOS]_H0_L0.7_Fab-1G6_L1.194_H1.279 Light Chain
DIQMTQSPSSVSASVGDRVTITCRASQGISSYLAWYQQKPGKAPKLLIYVASSLQSGVPSRFSGSGSGTDFTLTISSLQPEDFATYYCQQANSFPWTFGQGTKVEIKRTVAAPSVFIFPPSDEQLKSGTASVVCLLNNFYPREAKVQWKVDNALQSGNSQESVTEQDSKDSTYSLSSTLTLSKADYEKHKVYACEVTHQGLSSPVTKSFNRGEC

SEQ ID NO: 26478 - protein, 107 aa, Artificial Sequence
  Description of Artificial Sequence: Synthetic polypeptide
  VL of XENP022433
DIQMTQSPSSVSASVGDRVTITCRASQGISSYLAWYQQKPGKAPKLLIYVASSLQSGVPSRFSGSGSGTDFTLTISSLQPEDFATYYCQQANSFPWTFGQGTKVEIK

SEQ ID NO: 26479 - protein, 11 aa, Artificial Sequence
  Description of Artificial Sequence: Synthetic peptide
  XENP022433 vlCDR1
RASQGISSYLA

SEQ ID NO: 26480 - protein, 7 aa, Artificial Sequence
  Description of Artificial Sequence: Synthetic peptide
  XENP022433 vlCDR2
VASSLQS

SEQ ID NO: 26481 - protein, 9 aa, Artificial Sequence
  Description of Artificial Sequence: Synthetic peptide
  XENP022433 vlCDR3
QQANSFPWT

SEQ ID NO: 26482 - protein, 454 aa, Artificial Sequence; identical to SEQ ID NO: 26442
  Description of Artificial Sequence: Synthetic polypeptide
  XENP022744 [ICOS]_H0_L0.34_Fab-1G6_L1.194_H1.279 Fab-Fc Heavy Chain

SEQ ID NO: 26483 - protein, 125 aa, Artificial Sequence; identical to SEQ ID NO: 26293
  Description of Artificial Sequence: Synthetic polypeptide
  VH of XENP022744

SEQ ID NO: 26484 - protein, 5 aa, Artificial Sequence
  Description of Artificial Sequence: Synthetic peptide
  XENP022744 vhCDR1
GYYMH

SEQ ID NO: 26485 - protein, 17 aa, Artificial Sequence
  Description of Artificial Sequence: Synthetic peptide
  XENP022744 vhCDR2
WINPHSGGTNYAQKFQG

SEQ ID NO: 26486 - protein, 16 aa, Artificial Sequence
  Description of Artificial Sequence: Synthetic peptide
  XENP022744 vhCDR3
TYYYDSSGYYHDAFDI

SEQ ID NO: 26487 - protein, 480 aa, Artificial Sequence; identical to SEQ ID NO: 2870
  Description of Artificial Sequence: Synthetic polypeptide
  XENP022744 [ICOS]_H0_L0.34_Fab-1G6_L1.194_H1.279 scFv-Fc Heavy Chain

SEQ ID NO: 26488 - protein, 107 aa, Artificial Sequence; identical to SEQ ID NO: 2871
  Description of Artificial Sequence: Synthetic polypeptide
  VH of XENP022744

SEQ ID NO: 26489 - protein, 122 aa, Artificial Sequence; identical to SEQ ID NO: 2872
  Description of Artificial Sequence: Synthetic polypeptide
  VL of XENP022744

SEQ ID NO: 26490 - protein, 231 aa, Artificial Sequence; identical to SEQ ID NO: 2397
  Description of Artificial Sequence: Synthetic polypeptide
  Fc chain of XENP022744

SEQ ID NO: 26491 - protein, 11 aa, Artificial Sequence
  Description of Artificial Sequence: Synthetic peptide
  XENP022744 vhCDR1
RASQSVGNDVA

SEQ ID NO: 26492 - protein, 7 aa, Artificial Sequence
  Description of Artificial Sequence: Synthetic peptide
  XENP022744 vhCDR2
YASHRYT

SEQ ID NO: 26493 - protein, 9 aa, Artificial Sequence
  Description of Artificial Sequence: Synthetic peptide
  XENP022744 vhCDR3
QQDFSSPRT

SEQ ID NO: 26494 - protein, 5 aa, Artificial Sequence
  Description of Artificial Sequence: Synthetic peptide
  XENP022744 vlCDR1
NYWMN

SEQ ID NO: 26495 - protein, 19 aa, Artificial Sequence
  Description of Artificial Sequence: Synthetic peptide
  XENP022744 vlCDR2
EIRLYSNNYATHYAESVKG

SEQ ID NO: 26496 - protein, 11 aa, Artificial Sequence
  Description of Artificial Sequence: Synthetic peptide
  XENP022744 vlCDR3
YYGNYGGYFDV

SEQ ID NO: 26497 - protein, 214 aa, Artificial Sequence
  Description of Artificial Sequence: Synthetic polypeptide
  XENP022744 [ICOS]_H0_L0.34_Fab-1G6_L1.194_H1.279 Light Chain
DIQMTQSPSSVSASVGDRVTITCQASQDISRLLAWYQQKPGKAPKLLIYVASSLQSGVPSRFSGSGSGTDFTLTISSLQPEDFATYYCQQAESFPWTFGQGTKVEIKRTVAAPSVFIFPPSDEQLKSGTASVVCLLNNFYPREAKVQWKVDNALQSGNSQESVTEQDSKDSTYSLSSTLTLSKADYEKHKVYACEVTHQGLSSPVTKSFNRGEC

SEQ ID NO: 26498 - protein, 107 aa, Artificial Sequence
  Description of Artificial Sequence: Synthetic polypeptide
  VL of XENP022744
DIQMTQSPSSVSASVGDRVTITCQASQDISRLLAWYQQKPGKAPKLLIYVASSLQSGVPSRFSGSGSGTDFTLTISSLQPEDFATYYCQQAESFPWTFGQGTKVEIK

SEQ ID NO: 26499 - protein, 11 aa, Artificial Sequence
  Description of Artificial Sequence: Synthetic peptide
  XENP022744 vlCDR1
QASQDISRLLA

SEQ ID NO: 26500 - protein, 7 aa, Artificial Sequence
  Description of Artificial Sequence: Synthetic peptide
  XENP022744 vlCDR2
VASSLQS

SEQ ID NO: 26501 - protein, 9 aa, Artificial Sequence
  Description of Artificial Sequence: Synthetic peptide
  XENP022744 vlCDR3
QQAESFPWT

SEQ ID NO: 26502 - protein, 454 aa, Artificial Sequence; identical to SEQ ID NO: 26442
  Description of Artificial Sequence: Synthetic polypeptide
  XENP022746 [ICOS]_H0_L0.36_Fab-1G6_L1.194_H1.279 Fab-Fc Heavy Chain

SEQ ID NO: 26503 - protein, 125 aa, Artificial Sequence; identical to SEQ ID NO: 26293
  Description of Artificial Sequence: Synthetic polypeptide
  VH of XENP022746

SEQ ID NO: 26504 - protein, 5 aa, Artificial Sequence
  Description of Artificial Sequence: Synthetic peptide
  XENP022746 vhCDR1
GYYMH

SEQ ID NO: 26505 - protein, 17 aa, Artificial Sequence
  Description of Artificial Sequence: Synthetic peptide
  XENP022746 vhCDR2
WINPHSGGTNYAQKFQG

SEQ ID NO: 26506 - protein, 16 aa, Artificial Sequence
  Description of Artificial Sequence: Synthetic peptide
  XENP022746 vhCDR3
TYYYDSSGYYHDAFDI

SEQ ID NO: 26507 - protein, 480 aa, Artificial Sequence; identical to SEQ ID NO: 2870
  Description of Artificial Sequence: Synthetic polypeptide
  XENP022746 [ICOS]_H0_L0.36_Fab-1G6_L1.194_H1.279 scFv-Fc Heavy Chain

SEQ ID NO: 26508 - protein, 107 aa, Artificial Sequence; identical to SEQ ID NO: 2871
  Description of Artificial Sequence: Synthetic polypeptide
  VH of XENP022746

SEQ ID NO: 26509 - protein, 122 aa, Artificial Sequence; identical to SEQ ID NO: 2872
  Description of Artificial Sequence: Synthetic polypeptide
  VL of XENP022746

SEQ ID NO: 26510 - protein, 231 aa, Artificial Sequence; identical to SEQ ID NO: 2397
  Description of Artificial Sequence: Synthetic polypeptide
  Fc chain of XENP022746

SEQ ID NO: 26511 - protein, 11 aa, Artificial Sequence
  Description of Artificial Sequence: Synthetic peptide
  XENP022746 vhCDR1
RASQSVGNDVA

SEQ ID NO: 26512 - protein, 7 aa, Artificial Sequence
  Description of Artificial Sequence: Synthetic peptide
  XENP022746 vhCDR2
YASHRYT

SEQ ID NO: 26513 - protein, 9 aa, Artificial Sequence
  Description of Artificial Sequence: Synthetic peptide
  XENP022746 vhCDR3
QQDFSSPRT

SEQ ID NO: 26514 - protein, 5 aa, Artificial Sequence
  Description of Artificial Sequence: Synthetic peptide
  XENP022746 vlCDR1
NYWMN

SEQ ID NO: 26515 - protein, 19 aa, Artificial Sequence
  Description of Artificial Sequence: Synthetic peptide
  XENP022746 vlCDR2
EIRLYSNNYATHYAESVKG

SEQ ID NO: 26516 - protein, 11 aa, Artificial Sequence
  Description of Artificial Sequence: Synthetic peptide
  XENP022746 vlCDR3
YYGNYGGYFDV

SEQ ID NO: 26517 - protein, 214 aa, Artificial Sequence
  Description of Artificial Sequence: Synthetic polypeptide
  XENP022746 [ICOS]_H0_L0.36_Fab-1G6_L1.194_H1.279 Light Chain
DIQMTQSPSSVSASVGDRVTITCQASQDISSLLAWYQQKPGKAPKLLIYVASSLQSGVPSRFSGSGSGTDFTLTISSLQPEDFATYYCQQAESFPWTFGQGTKVEIKRTVAAPSVFIFPPSDEQLKSGTASVVCLLNNFYPREAKVQWKVDNALQSGNSQESVTEQDSKDSTYSLSSTLTLSKADYEKHKVYACEVTHQGLSSPVTKSFNRGEC

SEQ ID NO: 26518 - protein, 107 aa, Artificial Sequence
  Description of Artificial Sequence: Synthetic polypeptide
  VL of XENP022746
DIQMTQSPSSVSASVGDRVTITCQASQDISSLLAWYQQKPGKAPKLLIYVASSLQSGVPSRFSGSGSGTDFTLTISSLQPEDFATYYCQQAESFPWTFGQGTKVEIK

SEQ ID NO: 26519 - protein, 11 aa, Artificial Sequence
  Description of Artificial Sequence: Synthetic peptide
  XENP022746 vlCDR1
QASQDISSLLA

SEQ ID NO: 26520 - protein, 7 aa, Artificial Sequence
  Description of Artificial Sequence: Synthetic peptide
  XENP022746 vlCDR2
VASSLQS

SEQ ID NO: 26521 - protein, 9 aa, Artificial Sequence
  Description of Artificial Sequence: Synthetic peptide
  XENP022746 vlCDR3
QQAESFPWT

SEQ ID NO: 26522 - protein, 454 aa, Artificial Sequence; identical to SEQ ID NO: 26442
  Description of Artificial Sequence: Synthetic polypeptide
  XENP022747 [ICOS]_H0_L0.37_Fab-1G6_L1.194_H1.279 Fab-Fc Heavy Chain

SEQ ID NO: 26523 - protein, 125 aa, Artificial Sequence; identical to SEQ ID NO: 26293
  Description of Artificial Sequence: Synthetic polypeptide
  VH of XENP022747

SEQ ID NO: 26524 - protein, 5 aa, Artificial Sequence
  Description of Artificial Sequence: Synthetic peptide
  XENP022747 vhCDR1
GYYMH

SEQ ID NO: 26525 - protein, 17 aa, Artificial Sequence
  Description of Artificial Sequence: Synthetic peptide
  XENP022747 vhCDR2
WINPHSGGTNYAQKFQG

SEQ ID NO: 26526 - protein, 16 aa, Artificial Sequence
  Description of Artificial Sequence: Synthetic peptide
  XENP022747 vhCDR3
TYYYDSSGYYHDAFDI

SEQ ID NO: 26527 - protein, 480 aa, Artificial Sequence; identical to SEQ ID NO: 2870
  Description of Artificial Sequence: Synthetic polypeptide
  XENP022747 [ICOS]_H0_L0.37_Fab-1G6_L1.194_H1.279 scFv-Fc Heavy Chain

SEQ ID NO: 26528 - protein, 107 aa, Artificial Sequence; identical to SEQ ID NO: 2871
  Description of Artificial Sequence: Synthetic polypeptide
  VH of XENP022747

SEQ ID NO: 26529 - protein, 122 aa, Artificial Sequence; identical to SEQ ID NO: 2872
  Description of Artificial Sequence: Synthetic polypeptide
  VL of XENP022747

SEQ ID NO: 26530 - protein, 231 aa, Artificial Sequence; identical to SEQ ID NO: 2397
  Description of Artificial Sequence: Synthetic polypeptide
  Fc chain of XENP022747

SEQ ID NO: 26531 - protein, 11 aa, Artificial Sequence
  Description of Artificial Sequence: Synthetic peptide
  XENP022747 vhCDR1
RASQSVGNDVA

SEQ ID NO: 26532 - protein, 7 aa, Artificial Sequence
  Description of Artificial Sequence: Synthetic peptide
  XENP022747 vhCDR2
YASHRYT

SEQ ID NO: 26533 - protein, 9 aa, Artificial Sequence
  Description of Artificial Sequence: Synthetic peptide
  XENP022747 vhCDR3
QQDFSSPRT

SEQ ID NO: 26534 - protein, 5 aa, Artificial Sequence
  Description of Artificial Sequence: Synthetic peptide
  XENP022747 vlCDR1
NYWMN

SEQ ID NO: 26535 - protein, 19 aa, Artificial Sequence
  Description of Artificial Sequence: Synthetic peptide
  XENP022747 vlCDR2
EIRLYSNNYATHYAESVKG

SEQ ID NO: 26536 - protein, 11 aa, Artificial Sequence
  Description of Artificial Sequence: Synthetic peptide
  XENP022747 vlCDR3
YYGNYGGYFDV

SEQ ID NO: 26537 - protein, 214 aa, Artificial Sequence
  Description of Artificial Sequence: Synthetic polypeptide
  XENP022747 [ICOS]_H0_L0.37_Fab-1G6_L1.194_H1.279 Light Chain
DIQMTQSPSSVSASVGDRVTITCQASQDISRLLAWYQQKPGKAPKLLIYAASSLQSGVPSRFSGSGSGTDFTLTISSLQPEDFATYYCQQAESFPWTFGQGTKVEIKRTVAAPSVFIFPPSDEQLKSGTASVVCLLNNFYPREAKVQWKVDNALQSGNSQESVTEQDSKDSTYSLSSTLTLSKADYEKHKVYACEVTHQGLSSPVTKSFNRGEC

SEQ ID NO: 26538 - protein, 107 aa, Artificial Sequence
  Description of Artificial Sequence: Synthetic polypeptide
  VL of XENP022747
DIQMTQSPSSVSASVGDRVTITCQASQDISRLLAWYQQKPGKAPKLLIYAASSLQSGVPSRFSGSGSGTDFTLTISSLQPEDFATYYCQQAESFPWTFGQGTKVEIK

SEQ ID NO: 26539 - protein, 11 aa, Artificial Sequence
  Description of Artificial Sequence: Synthetic peptide
  XENP022747 vlCDR1
QASQDISRLLA

SEQ ID NO: 26540 - protein, 7 aa, Artificial Sequence
  Description of Artificial Sequence: Synthetic peptide
  XENP022747 vlCDR2
AASSLQS

SEQ ID NO: 26541 - protein, 9 aa, Artificial Sequence
  Description of Artificial Sequence: Synthetic peptide
  XENP022747 vlCDR3
QQAESFPWT

SEQ ID NO: 26542 - protein, 454 aa, Artificial Sequence; identical to SEQ ID NO: 26442
  Description of Artificial Sequence: Synthetic polypeptide
  XENP022748 [ICOS]_H0_L0.38_Fab-1G6_L1.194_H1.279 Fab-Fc Heavy Chain

SEQ ID NO: 26543 - protein, 125 aa, Artificial Sequence; identical to SEQ ID NO: 26293
  Description of Artificial Sequence: Synthetic polypeptide
  VH of XENP022748

SEQ ID NO: 26544 - protein, 5 aa, Artificial Sequence
  Description of Artificial Sequence: Synthetic peptide
  XENP022748 vhCDR1
GYYMH

SEQ ID NO: 26545 - protein, 17 aa, Artificial Sequence
  Description of Artificial Sequence: Synthetic peptide
  XENP022748 vhCDR2
WINPHSGGTNYAQKFQG

SEQ ID NO: 26546 - protein, 16 aa, Artificial Sequence
  Description of Artificial Sequence: Synthetic peptide
  XENP022748 vhCDR3
TYYYDSSGYYHDAFDI

SEQ ID NO: 26547 - protein, 480 aa, Artificial Sequence; identical to SEQ ID NO: 2870
  Description of Artificial Sequence: Synthetic polypeptide
  XENP022748 [ICOS]_H0_L0.38_Fab-1G6_L1.194_H1.279 scFv-Fc Heavy Chain

SEQ ID NO: 26548 - protein, 107 aa, Artificial Sequence; identical to SEQ ID NO: 2871
  Description of Artificial Sequence: Synthetic polypeptide
  VH of XENP022748

SEQ ID NO: 26549 - protein, 122 aa, Artificial Sequence; identical to SEQ ID NO: 2872
  Description of Artificial Sequence: Synthetic polypeptide
  VL of XENP022748

SEQ ID NO: 26550 - protein, 231 aa, Artificial Sequence; identical to SEQ ID NO: 2397
  Description of Artificial Sequence: Synthetic polypeptide
  Fc chain of XENP022748

SEQ ID NO: 26551 - protein, 11 aa, Artificial Sequence
  Description of Artificial Sequence: Synthetic peptide
  XENP022748 vhCDR1
RASQSVGNDVA

SEQ ID NO: 26552 - protein, 7 aa, Artificial Sequence
  Description of Artificial Sequence: Synthetic peptide
  XENP022748 vhCDR2
YASHRYT

SEQ ID NO: 26553 - protein, 9 aa, Artificial Sequence
  Description of Artificial Sequence: Synthetic peptide
  XENP022748 vhCDR3
QQDFSSPRT

SEQ ID NO: 26554 - protein, 5 aa, Artificial Sequence
  Description of Artificial Sequence: Synthetic peptide
  XENP022748 vlCDR1
NYWMN

SEQ ID NO: 26555 - protein, 19 aa, Artificial Sequence
  Description of Artificial Sequence: Synthetic peptide
  XENP022748 vlCDR2
EIRLYSNNYATHYAESVKG

SEQ ID NO: 26556 - protein, 11 aa, Artificial Sequence
  Description of Artificial Sequence: Synthetic peptide
  XENP022748 vlCDR3
YYGNYGGYFDV

SEQ ID NO: 26557 - protein, 214 aa, Artificial Sequence
  Description of Artificial Sequence: Synthetic polypeptide
  XENP022748 [ICOS]_H0_L0.38_Fab-1G6_L1.194_H1.279 Light Chain
DIQMTQSPSSVSASVGDRVTITCQASQDISSLLAWYQQKPGKAPKLLIYAASSLQSGVPSRFSGSGSGTDFTLTISSLQPEDFATYYCQQAESFPWTFGQGTKVEIKRTVAAPSVFIFPPSDEQLKSGTASVVCLLNNFYPREAKVQWKVDNALQSGNSQESVTEQDSKDSTYSLSSTLTLSKADYEKHKVYACEVTHQGLSSPVTKSFNRGEC

SEQ ID NO: 26558 - protein, 107 aa, Artificial Sequence
  Description of Artificial Sequence: Synthetic polypeptide
  VL of XENP022748
DIQMTQSPSSVSASVGDRVTITCQASQDISSLLAWYQQKPGKAPKLLIYAASSLQSGVPSRFSGSGSGTDFTLTISSLQPEDFATYYCQQAESFPWTFGQGTKVEIK

SEQ ID NO: 26559 - protein, 11 aa, Artificial Sequence
  Description of Artificial Sequence: Synthetic peptide
  XENP022748 vlCDR1
QASQDISSLLA

SEQ ID NO: 26560 - protein, 7 aa, Artificial Sequence
  Description of Artificial Sequence: Synthetic peptide
  XENP022748 vlCDR2
AASSLQS

SEQ ID NO: 26561 - protein, 9 aa, Artificial Sequence
  Description of Artificial Sequence: Synthetic peptide
  XENP022748 vlCDR3
QQAESFPWT

SEQ ID NO: 26562 - protein, 454 aa, Artificial Sequence
  Description of Artificial Sequence: Synthetic polypeptide
  XENP023092 [ICOS]_H0.66_L0_Fab-1G6_L1.194_H1.279 Fab-Fc Heavy Chain
QVQLVQSGAEVKKPGASVKVSCKASGYTFTGYYMHWVRQAPGQGLEWMGWINPHSGETIYAQKFQGRVTMTRDTSISTAYMELSSLRSEDTAVYYCARTYYYDTSGYYHDAFDVWGQGTMVTVSSASTKGPSVFPLAPSSKSTSGGTAALGCLVKDYFPEPVTVSWNSGALTSGVHTFPAVLQSSGLYSLSSVVTVPSSSLGTQTYICNVNHKPSDTKVDKKVEPKSCDKTHTCPPCPAPPVAGPSVFLFPPKPKDTLMISRTPEVTCVVVDVKHEDPEVKFNWYVDGVEVHNAKTKPREEEYNSTYRVVSVLTVLHQDWLNGKEYKCKVSNKALPAPIEKTISKAKGQPREPQVYTLPPSREEMTKNQVSLTCDVSGFYPSDIAVEWESDGQPENNYKTTPPVLDSDGSFFLYSKLTVDKSRWEQGDVFSCSVMHEALHNHYTQKSLSLSPGK

SEQ ID NO: 26563 - protein, 125 aa, Artificial Sequence
  Description of Artificial Sequence: Synthetic polypeptide
  VH of XENP023092
QVQLVQSGAEVKKPGASVKVSCKASGYTFTGYYMHWVRQAPGQGLEWMGWINPHSGETIYAQKFQGRVTMTRDTSISTAYMELSSLRSEDTAVYYCARTYYYDTSGYYHDAFDVWGQGTMVTVSS

SEQ ID NO: 26564 - protein, 5 aa, Artificial Sequence
  Description of Artificial Sequence: Synthetic peptide
  XENP023092 vhCDR1
GYYMH

SEQ ID NO: 26565 - protein, 17 aa, Artificial Sequence
  Description of Artificial Sequence: Synthetic peptide
  XENP023092 vhCDR2
WINPHSGETIYAQKFQG

SEQ ID NO: 26566 - protein, 16 aa, Artificial Sequence
  Description of Artificial Sequence: Synthetic peptide
  XENP023092 vhCDR3
TYYYDTSGYYHDAFDV

SEQ ID NO: 26567 - protein, 480 aa, Artificial Sequence; identical to SEQ ID NO: 2870
  Description of Artificial Sequence: Synthetic polypeptide
  XENP023092 [ICOS]_H0.66_L0_Fab-1G6_L1.194_H1.279 scFv-Fc Heavy Chain

SEQ ID NO: 26568 - protein, 107 aa, Artificial Sequence; identical to SEQ ID NO: 2871
  Description of Artificial Sequence: Synthetic polypeptide
  VH of XENP023092

SEQ ID NO: 26569 - protein, 122 aa, Artificial Sequence; identical to SEQ ID NO: 2872
  Description of Artificial Sequence: Synthetic polypeptide
  VL of XENP023092

SEQ ID NO: 26570 - protein, 231 aa, Artificial Sequence; identical to SEQ ID NO: 2397
  Description of Artificial Sequence: Synthetic polypeptide
  Fc chain of XENP023092

SEQ ID NO: 26571 - protein, 11 aa, Artificial Sequence
  Description of Artificial Sequence: Synthetic peptide
  XENP023092 vhCDR1
RASQSVGNDVA

SEQ ID NO: 26572 - protein, 7 aa, Artificial Sequence
  Description of Artificial Sequence: Synthetic peptide
  XENP023092 vhCDR2
YASHRYT

SEQ ID NO: 26573 - protein, 9 aa, Artificial Sequence
  Description of Artificial Sequence: Synthetic peptide
  XENP023092 vhCDR3
QQDFSSPRT

SEQ ID NO: 26574 - protein, 5 aa, Artificial Sequence
  Description of Artificial Sequence: Synthetic peptide
  XENP023092 vlCDR1
NYWMN

SEQ ID NO: 26575 - protein, 19 aa, Artificial Sequence
  Description of Artificial Sequence: Synthetic peptide
  XENP023092 vlCDR2
EIRLYSNNYATHYAESVKG

SEQ ID NO: 26576 - protein, 11 aa, Artificial Sequence
  Description of Artificial Sequence: Synthetic peptide
  XENP023092 vlCDR3
YYGNYGGYFDV

SEQ ID NO: 26577 - protein, 214 aa, Artificial Sequence; identical to SEQ ID NO: 26297
  Description of Artificial Sequence: Synthetic polypeptide
  XENP023092 [ICOS]_H0.66_L0_Fab-1G6_L1.194_H1.279 Light Chain

SEQ ID NO: 26578 - protein, 107 aa, Artificial Sequence; identical to SEQ ID NO: 26298
  Description of Artificial Sequence: Synthetic polypeptide
  VL of XENP023092

SEQ ID NO: 26579 - protein, 11 aa, Artificial Sequence
  Description of Artificial Sequence: Synthetic peptide
  XENP023092 vlCDR1
RASQGISRLLA

SEQ ID NO: 26580 - protein, 7 aa, Artificial Sequence
  Description of Artificial Sequence: Synthetic peptide
  XENP023092 vlCDR2
VASSLQS

SEQ ID NO: 26581 - protein, 9 aa, Artificial Sequence
  Description of Artificial Sequence: Synthetic peptide
  XENP023092 vlCDR3
QQANSFPWT

SEQ ID NO: 26582 - protein, 454 aa, Artificial Sequence; identical to SEQ ID NO: 26562
  Description of Artificial Sequence: Synthetic polypeptide
  XENP023410 [ICOS]_H0.66_L0.34_Fab-1G6_L1.194_H1.279 Fab-Fc Heavy Chain

SEQ ID NO: 26583 - protein, 125 aa, Artificial Sequence; identical to SEQ ID NO: 26563
  Description of Artificial Sequence: Synthetic polypeptide
  VH of XENP023410

SEQ ID NO: 26584 - protein, 5 aa, Artificial Sequence
  Description of Artificial Sequence: Synthetic peptide
  XENP023410 vhCDR1
GYYMH

SEQ ID NO: 26585 - protein, 17 aa, Artificial Sequence
  Description of Artificial Sequence: Synthetic peptide
  XENP023410 vhCDR2
WINPHSGETIYAQKFQG

SEQ ID NO: 26586 - protein, 16 aa, Artificial Sequence
  Description of Artificial Sequence: Synthetic peptide
  XENP023410 vhCDR3
TYYYDTSGYYHDAFDV

SEQ ID NO: 26587 - protein, 480 aa, Artificial Sequence; identical to SEQ ID NO: 2870
  Description of Artificial Sequence: Synthetic polypeptide
  XENP023410 [ICOS]_H0.66_L0.34_Fab-1G6_L1.194_H1.279 scFv-Fc Heavy Chain

SEQ ID NO: 26588 - protein, 107 aa, Artificial Sequence; identical to SEQ ID NO: 2871
  Description of Artificial Sequence: Synthetic polypeptide
  VH of XENP023410

SEQ ID NO: 26589 - protein, 122 aa, Artificial Sequence; identical to SEQ ID NO: 2872
  Description of Artificial Sequence: Synthetic polypeptide
  VL of XENP023410

SEQ ID NO: 26590 - protein, 231 aa, Artificial Sequence; identical to SEQ ID NO: 2397
  Description of Artificial Sequence: Synthetic polypeptide
  Fc chain of XENP023410

SEQ ID NO: 26591 - protein, 11 aa, Artificial Sequence
  Description of Artificial Sequence: Synthetic peptide
  XENP023410 vhCDR1
RASQSVGNDVA

SEQ ID NO: 26592 - protein, 7 aa, Artificial Sequence
  Description of Artificial Sequence: Synthetic peptide
  XENP023410 vhCDR2
YASHRYT

SEQ ID NO: 26593 - protein, 9 aa, Artificial Sequence
  Description of Artificial Sequence: Synthetic peptide
  XENP023410 vhCDR3
QQDFSSPRT

SEQ ID NO: 26594 - protein, 5 aa, Artificial Sequence
  Description of Artificial Sequence: Synthetic peptide
  XENP023410 vlCDR1
NYWMN

SEQ ID NO: 26595 - protein, 19 aa, Artificial Sequence
  Description of Artificial Sequence: Synthetic peptide
  XENP023410 vlCDR2
EIRLYSNNYATHYAESVKG

SEQ ID NO: 26596 - protein, 11 aa, Artificial Sequence
  Description of Artificial Sequence: Synthetic peptide
  XENP023410 vlCDR3
YYGNYGGYFDV

SEQ ID NO: 26597 - protein, 214 aa, Artificial Sequence; identical to SEQ ID NO: 26497
  Description of Artificial Sequence: Synthetic polypeptide
  XENP023410 [ICOS]_H0.66_L0.34_Fab-1G6_L1.194_H1.279 Light Chain

SEQ ID NO: 26598 - protein, 107 aa, Artificial Sequence; identical to SEQ ID NO: 26498
  Description of Artificial Sequence: Synthetic polypeptide
  VL of XENP023410

SEQ ID NO: 26599 - protein, 11 aa, Artificial Sequence
  Description of Artificial Sequence: Synthetic peptide
  XENP023410 vlCDR1
QASQDISRLLA

SEQ ID NO: 26600 - protein, 7 aa, Artificial Sequence
  Description of Artificial Sequence: Synthetic peptide
  XENP023410 vlCDR2
VASSLQS

SEQ ID NO: 26601 - protein, 9 aa, Artificial Sequence
  Description of Artificial Sequence: Synthetic peptide
  XENP023410 vlCDR3
QQAESFPWT

SEQ ID NO: 26602 - protein, 454 aa, Artificial Sequence; identical to SEQ ID NO: 26362
  Description of Artificial Sequence: Synthetic polypeptide
  XENP022730 [ICOS]_H0L0_Fab-1G6_L1.194_H1.279 Fab-Fc Heavy Chain

SEQ ID NO: 26603 - protein, 125 aa, Artificial Sequence; identical to SEQ ID NO: 26293
  Description of Artificial Sequence: Synthetic polypeptide
  VH of XENP022730

SEQ ID NO: 26604 - protein, 5 aa, Artificial Sequence
  Description of Artificial Sequence: Synthetic peptide
  XENP022730 vhCDR1
GYYMH

SEQ ID NO: 26605 - protein, 17 aa, Artificial Sequence
  Description of Artificial Sequence: Synthetic peptide
  XENP022730 vhCDR2
WINPHSGGTNYAQKFQG

SEQ ID NO: 26606 - protein, 16 aa, Artificial Sequence
  Description of Artificial Sequence: Synthetic peptide
  XENP022730 vhCDR3
TYYYDSSGYYHDAFDI

SEQ ID NO: 26607 - protein, 480 aa, Artificial Sequence; identical to SEQ ID NO: 2930
  Description of Artificial Sequence: Synthetic polypeptide
  XENP022730 [ICOS]_H0L0_Fab-1G6_L1.194_H1.279 scFv-Fc Heavy Chain

SEQ ID NO: 26608 - protein, 107 aa, Artificial Sequence; identical to SEQ ID NO: 2871
  Description of Artificial Sequence: Synthetic polypeptide
  VH of XENP022730

SEQ ID NO: 26609 - protein, 122 aa, Artificial Sequence; identical to SEQ ID NO: 2872
  Description of Artificial Sequence: Synthetic polypeptide
  VL of XENP022730

SEQ ID NO: 26610 - protein, 231 aa, Artificial Sequence; identical to SEQ ID NO: 2409
  Description of Artificial Sequence: Synthetic polypeptide
  Fc chain of XENP022730

SEQ ID NO: 26611 - protein, 11 aa, Artificial Sequence
  Description of Artificial Sequence: Synthetic peptide
  XENP022730 vhCDR1
RASQSVGNDVA

SEQ ID NO: 26612 - protein, 7 aa, Artificial Sequence
  Description of Artificial Sequence: Synthetic peptide
  XENP022730 vhCDR2
YASHRYT

SEQ ID NO: 26613 - protein, 9 aa, Artificial Sequence
  Description of Artificial Sequence: Synthetic peptide
  XENP022730 vhCDR3
QQDFSSPRT

SEQ ID NO: 26614 - protein, 5 aa, Artificial Sequence
  Description of Artificial Sequence: Synthetic peptide
  XENP022730 vlCDR1
NYWMN

SEQ ID NO: 26615 - protein, 19 aa, Artificial Sequence
  Description of Artificial Sequence: Synthetic peptide
  XENP022730 vlCDR2
EIRLYSNNYATHYAESVKG

SEQ ID NO: 26616 - protein, 11 aa, Artificial Sequence
  Description of Artificial Sequence: Synthetic peptide
  XENP022730 vlCDR3
YYGNYGGYFDV

SEQ ID NO: 26617 - protein, 214 aa, Artificial Sequence; identical to SEQ ID NO: 26297
  Description of Artificial Sequence: Synthetic polypeptide
  XENP022730 [ICOS]_H0L0_Fab-1G6_L1.194_H1.279 Light Chain

SEQ ID NO: 26618 - protein, 107 aa, Artificial Sequence; identical to SEQ ID NO: 26298
  Description of Artificial Sequence: Synthetic polypeptide
  VL of XENP022730

SEQ ID NO: 26619 - protein, 11 aa, Artificial Sequence
  Description of Artificial Sequence: Synthetic peptide
  XENP022730 vlCDR1
RASQGISRLLA

SEQ ID NO: 26620 - protein, 7 aa, Artificial Sequence
  Description of Artificial Sequence: Synthetic peptide
  XENP022730 vlCDR2
VASSLQS

SEQ ID NO: 26621 - protein, 9 aa, Artificial Sequence
  Description of Artificial Sequence: Synthetic peptide
  XENP022730 vlCDR3
QQANSFPWT

SEQ ID NO: 26622 - protein, 454 aa, Artificial Sequence; identical to SEQ ID NO: 26362
  Description of Artificial Sequence: Synthetic polypeptide
  XENP022974 [ICOS]_H0_L0.34_Fab-1G6_L1.194_H1.279 Fab-Fc Heavy Chain

SEQ ID NO: 26623 - protein, 125 aa, Artificial Sequence; identical to SEQ ID NO: 26293
  Description of Artificial Sequence: Synthetic polypeptide
  VH of XENP022974

SEQ ID NO: 26624 - protein, 5 aa, Artificial Sequence
  Description of Artificial Sequence: Synthetic peptide
  XENP022974 vhCDR1
GYYMH

SEQ ID NO: 26625 - protein, 17 aa, Artificial Sequence
  Description of Artificial Sequence: Synthetic peptide
  XENP022974 vhCDR2
WINPHSGGTNYAQKFQG

SEQ ID NO: 26626 - protein, 16 aa, Artificial Sequence
  Description of Artificial Sequence: Synthetic peptide
  XENP022974 vhCDR3
TYYYDSSGYYHDAFDI

SEQ ID NO: 26627 - protein, 480 aa, Artificial Sequence; identical to SEQ ID NO: 2930
  Description of Artificial Sequence: Synthetic polypeptide
  XENP022974 [ICOS]_H0_L0.34_Fab-1G6_L1.194_H1.279 scFv-Fc Heavy Chain

SEQ ID NO: 26628 - protein, 107 aa, Artificial Sequence; identical to SEQ ID NO: 2871
  Description of Artificial Sequence: Synthetic polypeptide
  VH of XENP022974

SEQ ID NO: 26629 - protein, 122 aa, Artificial Sequence; identical to SEQ ID NO: 2872
  Description of Artificial Sequence: Synthetic polypeptide
  VL of XENP022974

SEQ ID NO: 26630 - protein, 231 aa, Artificial Sequence; identical to SEQ ID NO: 2409
  Description of Artificial Sequence: Synthetic polypeptide
  Fc chain of XENP022974

SEQ ID NO: 26631 - protein, 11 aa, Artificial Sequence
  Description of Artificial Sequence: Synthetic peptide
  XENP022974 vhCDR1
RASQSVGNDVA

SEQ ID NO: 26632 - protein, 7 aa, Artificial Sequence
  Description of Artificial Sequence: Synthetic peptide
  XENP022974 vhCDR2
YASHRYT

SEQ ID NO: 26633 - protein, 9 aa, Artificial Sequence
  Description of Artificial Sequence: Synthetic peptide
  XENP022974 vhCDR3
QQDFSSPRT

SEQ ID NO: 26634 - protein, 5 aa, Artificial Sequence
  Description of Artificial Sequence: Synthetic peptide
  XENP022974 vlCDR1
NYWMN

SEQ ID NO: 26635 - protein, 19 aa, Artificial Sequence
  Description of Artificial Sequence: Synthetic peptide
  XENP022974 vlCDR2
EIRLYSNNYATHYAESVKG

SEQ ID NO: 26636 - protein, 11 aa, Artificial Sequence
  Description of Artificial Sequence: Synthetic peptide
  XENP022974 vlCDR3
YYGNYGGYFDV

SEQ ID NO: 26637 - protein, 214 aa, Artificial Sequence; identical to SEQ ID NO: 26497
  Description of Artificial Sequence: Synthetic polypeptide
  XENP022974 [ICOS]_H0_L0.34_Fab-1G6_L1.194_H1.279 Light Chain

SEQ ID NO: 26638 - protein, 107 aa, Artificial Sequence; identical to SEQ ID NO: 26498
  Description of Artificial Sequence: Synthetic polypeptide
  VL of XENP022974

SEQ ID NO: 26639 - protein, 11 aa, Artificial Sequence
  Description of Artificial Sequence: Synthetic peptide
  XENP022974 vlCDR1
QASQDISRLLA

SEQ ID NO: 26640 - protein, 7 aa, Artificial Sequence
  Description of Artificial Sequence: Synthetic peptide
  XENP022974 vlCDR2
VASSLQS

SEQ ID NO: 26641 - protein, 9 aa, Artificial Sequence
  Description of Artificial Sequence: Synthetic peptide
  XENP022974 vlCDR3
QQAESFPWT

SEQ ID NO: 26642 - protein, 454 aa, Artificial Sequence
  Description of Artificial Sequence: Synthetic polypeptide
  XENP023104 [ICOS]_H0.66_L0_Fab-1G6_L1.194_H1.279 Fab-Fc Heavy Chain
QVQLVQSGAEVKKPGASVKVSCKASGYTFTGYYMHWVRQAPGQGLEWMGWINPHSGETIYAQKFQGRVTMTRDTSISTAYMELSSLRSEDTAVYYCARTYYYDTSGYYHDAFDVWGQGTMVTVSSASTKGPSVFPLAPSSKSTSGGTAALGCLVKDYFPEPVTVSWNSGALTSGVHTFPAVLQSSGLYSLSSVVTVPSSSLGTQTYICNVNHKPSDTKVDKKVEPKSCDKTHTCPPCPAPPVAGPSVFLFPPKPKDTLMISRTPEVTCVVVDVKHEDPEVKFNWYVDGVEVHNAKTKPREEEYNSTYRVVSVLTVLHQDWLNGKEYKCKVSNKALPAPIEKTISKAKGQPREPQVYTLPPSREEMTKNQVSLTCDVSGFYPSDIAVEWESDGQPENNYKTTPPVLDSDGSFFLYSKLTVDKSRWEQGDVFSCSVLHEALHSHYTQKSLSLSPGK

SEQ ID NO: 26643 - protein, 125 aa, Artificial Sequence; identical to SEQ ID NO: 26563
  Description of Artificial Sequence: Synthetic polypeptide
  VH of XENP023104

SEQ ID NO: 26644 - protein, 5 aa, Artificial Sequence
  Description of Artificial Sequence: Synthetic peptide
  XENP023104 vhCDR1
GYYMH

SEQ ID NO: 26645 - protein, 17 aa, Artificial Sequence
  Description of Artificial Sequence: Synthetic peptide
  XENP023104 vhCDR2
WINPHSGETIYAQKFQG

SEQ ID NO: 26646 - protein, 16 aa, Artificial Sequence
  Description of Artificial Sequence: Synthetic peptide
  XENP023104 vhCDR3
TYYYDTSGYYHDAFDV

SEQ ID NO: 26647 - protein, 480 aa, Artificial Sequence; identical to SEQ ID NO: 2930
  Description of Artificial Sequence: Synthetic polypeptide
  XENP023104 [ICOS]_H0.66_L0_Fab-1G6_L1.194_H1.279 scFv-Fc Heavy Chain

SEQ ID NO: 26648 - protein, 107 aa, Artificial Sequence; identical to SEQ ID NO: 2871
  Description of Artificial Sequence: Synthetic polypeptide
  VH of XENP023104

SEQ ID NO: 26649 - protein, 122 aa, Artificial Sequence; identical to SEQ ID NO: 2872
  Description of Artificial Sequence: Synthetic polypeptide
  VL of XENP023104

SEQ ID NO: 26650 - protein, 231 aa, Artificial Sequence; identical to SEQ ID NO: 2409
  Description of Artificial Sequence: Synthetic polypeptide
  Fc chain of XENP023104

SEQ ID NO: 26651 - protein, 11 aa, Artificial Sequence
  Description of Artificial Sequence: Synthetic peptide
  XENP023104 vhCDR1
RASQSVGNDVA

SEQ ID NO: 26652 - protein, 7 aa, Artificial Sequence
  Description of Artificial Sequence: Synthetic peptide
  XENP023104 vhCDR2
YASHRYT

SEQ ID NO: 26653 - protein, 9 aa, Artificial Sequence
  Description of Artificial Sequence: Synthetic peptide
  XENP023104 vhCDR3
QQDFSSPRT

SEQ ID NO: 26654 - protein, 5 aa, Artificial Sequence
  Description of Artificial Sequence: Synthetic peptide
  XENP023104 vlCDR1
NYWMN

SEQ ID NO: 26655 - protein, 19 aa, Artificial Sequence
  Description of Artificial Sequence: Synthetic peptide
  XENP023104 vlCDR2
EIRLYSNNYATHYAESVKG

SEQ ID NO: 26656 - protein, 11 aa, Artificial Sequence
  Description of Artificial Sequence: Synthetic peptide
  XENP023104 vlCDR3
YYGNYGGYFDV

SEQ ID NO: 26657 - protein, 214 aa, Artificial Sequence; identical to SEQ ID NO: 26297
  Description of Artificial Sequence: Synthetic polypeptide
  XENP023104 [ICOS]_H0.66_L0_Fab-1G6_L1.194_H1.279 Light Chain

SEQ ID NO: 26658 - protein, 107 aa, Artificial Sequence; identical to SEQ ID NO: 26298
  Description of Artificial Sequence: Synthetic polypeptide
  VL of XENP023104

SEQ ID NO: 26659 - protein, 11 aa, Artificial Sequence
  Description of Artificial Sequence: Synthetic peptide
  XENP023104 vlCDR1
RASQGISRLLA

SEQ ID NO: 26660 - protein, 7 aa, Artificial Sequence
  Description of Artificial Sequence: Synthetic peptide
  XENP023104 vlCDR2
VASSLQS

SEQ ID NO: 26661 - protein, 9 aa, Artificial Sequence
  Description of Artificial Sequence: Synthetic peptide
  XENP023104 vlCDR3
QQANSFPWT

SEQ ID NO: 26662 - protein, 454 aa, Artificial Sequence; identical to SEQ ID NO: 26642
  Description of Artificial Sequence: Synthetic polypeptide
  XENP023411 [ICOS]_H0.66_L0.34_Fab-1G6_L1.194_H1.279 Fab-Fc Heavy Chain

SEQ ID NO: 26663 - protein, 125 aa, Artificial Sequence; identical to SEQ ID NO: 26563
  Description of Artificial Sequence: Synthetic polypeptide
  VH of XENP023411

SEQ ID NO: 26664 - protein, 5 aa, Artificial Sequence
  Description of Artificial Sequence: Synthetic peptide
  XENP023411 vhCDR1
GYYMH

SEQ ID NO: 26665 - protein, 17 aa, Artificial Sequence
  Description of Artificial Sequence: Synthetic peptide
  XENP023411 vhCDR2
WINPHSGETIYAQKFQG

SEQ ID NO: 26666 - protein, 16 aa, Artificial Sequence
  Description of Artificial Sequence: Synthetic peptide
  XENP023411 vhCDR3
TYYYDTSGYYHDAFDV

SEQ ID NO: 26667 - protein, 480 aa, Artificial Sequence; identical to SEQ ID NO: 2930
  Description of Artificial Sequence: Synthetic polypeptide
  XENP023411 [ICOS]_H0.66_L0.34_Fab-1G6_L1.194_H1.279 scFv-Fc Heavy Chain

SEQ ID NO: 26668 - protein, 107 aa, Artificial Sequence; identical to SEQ ID NO: 2871
  Description of Artificial Sequence: Synthetic polypeptide
  VH of XENP023411

SEQ ID NO: 26669 - protein, 122 aa, Artificial Sequence; identical to SEQ ID NO: 2872
  Description of Artificial Sequence: Synthetic polypeptide
  VL of XENP023411

SEQ ID NO: 26670 - protein, 231 aa, Artificial Sequence; identical to SEQ ID NO: 2409
  Description of Artificial Sequence: Synthetic polypeptide
  Fc chain of XENP023411

SEQ ID NO: 26671 - protein, 11 aa, Artificial Sequence
  Description of Artificial Sequence: Synthetic peptide
  XENP023411 vhCDR1
RASQSVGNDVA

SEQ ID NO: 26672 - protein, 7 aa, Artificial Sequence
  Description of Artificial Sequence: Synthetic peptide
  XENP023411 vhCDR2
YASHRYT

SEQ ID NO: 26673 - protein, 9 aa, Artificial Sequence
  Description of Artificial Sequence: Synthetic peptide
  XENP023411 vhCDR3
QQDFSSPRT

SEQ ID NO: 26674 - protein, 5 aa, Artificial Sequence
  Description of Artificial Sequence: Synthetic peptide
  XENP023411 vlCDR1
NYWMN

SEQ ID NO: 26675 - protein, 19 aa, Artificial Sequence
  Description of Artificial Sequence: Synthetic peptide
  XENP023411 vlCDR2
EIRLYSNNYATHYAESVKG

SEQ ID NO: 26676 - protein, 11 aa, Artificial Sequence
  Description of Artificial Sequence: Synthetic peptide
  XENP023411 vlCDR3
YYGNYGGYFDV

SEQ ID NO: 26677 - protein, 214 aa, Artificial Sequence; identical to SEQ ID NO: 26497
  Description of Artificial Sequence: Synthetic polypeptide
  XENP023411 [ICOS]_H0.66_L0.34_Fab-1G6_L1.194_H1.279 Light Chain

SEQ ID NO: 26678 - protein, 107 aa, Artificial Sequence; identical to SEQ ID NO: 26498
  Description of Artificial Sequence: Synthetic polypeptide
  VL of XENP023411

SEQ ID NO: 26679 - protein, 11 aa, Artificial Sequence
  Description of Artificial Sequence: Synthetic peptide
  XENP023411 vlCDR1
QASQDISRLLA

SEQ ID NO: 26680 - protein, 7 aa, Artificial Sequence
  Description of Artificial Sequence: Synthetic peptide
  XENP023411 vlCDR2
VASSLQS

SEQ ID NO: 26681 - protein, 9 aa, Artificial Sequence
  Description of Artificial Sequence: Synthetic peptide
  XENP023411 vlCDR3
QQAESFPWT

SEQ ID NO: 26682 - protein, 452 aa, Artificial Sequence
  Description of Artificial Sequence: Synthetic polypeptide
  XENP021828 GSK_314.8[ICOS]_H0L0_Fab-1G6_L1.194_H1.279_scFv Fab-Fc Heavy Chain
QVQLQQPGTELMKPGASVKLSCKASGYTFTTYWMHWVKQRPGQGLEWIGEIDPSDSYVNYNQNFKGKATLTVDKSSSTAYIQLSSLTSEDSAVYFCARSPDYYGTSLAWFDYWGQGTLVTVSTASTKGPSVFPLAPSSKSTSGGTAALGCLVKDYFPEPVTVSWNSGALTSGVHTFPAVLQSSGLYSLSSVVTVPSSSLGTQTYICNVNHKPSDTKVDKKVEPKSCDKTHTCPPCPAPPVAGPSVFLFPPKPKDTLMISRTPEVTCVVVDVKHEDPEVKFNWYVDGVEVHNAKTKPREEEYNSTYRVVSVLTVLHQDWLNGKEYKCKVSNKALPAPIEKTISKAKGQPREPQVYTLPPSREEMTKNQVSLTCDVSGFYPSDIAVEWESDGQPENNYKTTPPVLDSDGSFFLYSKLTVDKSRWEQGDVFSCSVMHEALHNHYTQKSLSLSPGK

SEQ ID NO: 26683 - protein, 123 aa, Artificial Sequence; identical to SEQ ID NO: 26303
  Description of Artificial Sequence: Synthetic polypeptide
  VH of XENP021828

SEQ ID NO: 26684 - protein, 5 aa, Artificial Sequence
  Description of Artificial Sequence: Synthetic peptide
  XENP021828 vhCDR1
TYWMH

SEQ ID NO: 26685 - protein, 17 aa, Artificial Sequence
  Description of Artificial Sequence: Synthetic peptide
  XENP021828 vhCDR2
EIDPSDSYVNYNQNFKG

SEQ ID NO: 26686 - protein, 14 aa, Artificial Sequence
  Description of Artificial Sequence: Synthetic peptide
  XENP021828 vhCDR3
SPDYYGTSLAWFDY

SEQ ID NO: 26687 - protein, 480 aa, Artificial Sequence; identical to SEQ ID NO: 2870
  Description of Artificial Sequence: Synthetic polypeptide
  XENP021828 GSK_314.8[ICOS]_H0L0_Fab-1G6_L1.194_H1.279_scFv scFv-Fc Heavy Chain

SEQ ID NO: 26688 - protein, 107 aa, Artificial Sequence; identical to SEQ ID NO: 2871
  Description of Artificial Sequence: Synthetic polypeptide
  VH of XENP021828

SEQ ID NO: 26689 - protein, 122 aa, Artificial Sequence; identical to SEQ ID NO: 2872
  Description of Artificial Sequence: Synthetic polypeptide
  VL of XENP021828

SEQ ID NO: 26690 - protein, 231 aa, Artificial Sequence; identical to SEQ ID NO: 2397
  Description of Artificial Sequence: Synthetic polypeptide
  Fc chain of XENP021828

SEQ ID NO: 26691 - protein, 11 aa, Artificial Sequence
  Description of Artificial Sequence: Synthetic peptide
  XENP021828 vhCDR1
RASQSVGNDVA

SEQ ID NO: 26692 - protein, 7 aa, Artificial Sequence
  Description of Artificial Sequence: Synthetic peptide
  XENP021828 vhCDR2
YASHRYT

SEQ ID NO: 26693 - protein, 9 aa, Artificial Sequence
  Description of Artificial Sequence: Synthetic peptide
  XENP021828 vhCDR3
QQDFSSPRT

SEQ ID NO: 26694 - protein, 5 aa, Artificial Sequence
  Description of Artificial Sequence: Synthetic peptide
  XENP021828 vlCDR1
NYWMN

SEQ ID NO: 26695 - protein, 19 aa, Artificial Sequence
  Description of Artificial Sequence: Synthetic peptide
  XENP021828 vlCDR2
EIRLYSNNYATHYAESVKG

SEQ ID NO: 26696 - protein, 11 aa, Artificial Sequence
  Description of Artificial Sequence: Synthetic peptide
  XENP021828 vlCDR3
YYGNYGGYFDV

SEQ ID NO: 26697 - protein, 219 aa, Artificial Sequence; identical to SEQ ID NO: 26307
  Description of Artificial Sequence: Synthetic polypeptide
  XENP021828 GSK_314.8[ICOS]_H0L0_Fab-1G6_L1.194_H1.279_scFv Light Chain

SEQ ID NO: 26698 - protein, 112 aa, Artificial Sequence; identical to SEQ ID NO: 26308
  Description of Artificial Sequence: Synthetic polypeptide
  VL of XENP021828

SEQ ID NO: 26699 - protein, 16 aa, Artificial Sequence
  Description of Artificial Sequence: Synthetic peptide
  XENP021828 vlCDR1
RSSKSPLHSNGNIYLY

SEQ ID NO: 26700 - protein, 7 aa, Artificial Sequence
  Description of Artificial Sequence: Synthetic peptide
  XENP021828 vlCDR2
RMSNLAS

SEQ ID NO: 26701 - protein, 9 aa, Artificial Sequence
  Description of Artificial Sequence: Synthetic peptide
  XENP021828 vlCDR3
MQHLEYPYT

SEQ ID NO: 26702 - protein, 453 aa, Artificial Sequence
  Description of Artificial Sequence: Synthetic polypeptide
  XENP021829 GSK_88.2[ICOS]_H0L0_Fab-1G6_L1.194_H1.279_scFv Fab-Fc Heavy Chain
QVQLQQPGAELVRPGASVKLSCKASGYSFTSYWINWVKQRPGQGLEWIGNIYPSDSYTNYNQMFKDKATLTVDKSSNTAYMQLTSPTSEDSAVYYCTRWNLSYYFDNNYYLDYWGQGTTLTVSSASTKGPSVFPLAPSSKSTSGGTAALGCLVKDYFPEPVTVSWNSGALTSGVHTFPAVLQSSGLYSLSSVVTVPSSSLGTQTYICNVNHKPSDTKVDKKVEPKSCDKTHTCPPCPAPPVAGPSVFLFPPKPKDTLMISRTPEVTCVVVDVKHEDPEVKFNWYVDGVEVHNAKTKPREEEYNSTYRVVSVLTVLHQDWLNGKEYKCKVSNKALPAPIEKTISKAKGQPREPQVYTLPPSREEMTKNQVSLTCDVSGFYPSDIAVEWESDGQPENNYKTTPPVLDSDGSFFLYSKLTVDKSRWEQGDVFSCSVMHEALHNHYTQKSLSLSPGK

SEQ ID NO: 26703 - protein, 124 aa, Artificial Sequence; identical to SEQ ID NO: 26313
  Description of Artificial Sequence: Synthetic polypeptide
  VH of XENP021829

SEQ ID NO: 26704 - protein, 5 aa, Artificial Sequence
  Description of Artificial Sequence: Synthetic peptide
  XENP021829 vhCDR1
SYWIN

SEQ ID NO: 26705 - protein, 17 aa, Artificial Sequence
  Description of Artificial Sequence: Synthetic peptide
  XENP021829 vhCDR2
NIYPSDSYTNYNQMFKD

SEQ ID NO: 26706 - protein, 15 aa, Artificial Sequence
  Description of Artificial Sequence: Synthetic peptide
  XENP021829 vhCDR3
WNLSYYFDNNYYLDY

SEQ ID NO: 26707 - protein, 480 aa, Artificial Sequence; identical to SEQ ID NO: 2870
  Description of Artificial Sequence: Synthetic polypeptide
  XENP021829 GSK_88.2[ICOS]_H0L0_Fab-1G6_L1.194_H1.279_scFv scFv-Fc Heavy Chain

SEQ ID NO: 26708 - protein, 107 aa, Artificial Sequence; identical to SEQ ID NO: 2871
  Description of Artificial Sequence: Synthetic polypeptide
  VH of XENP021829

SEQ ID NO: 26709 - protein, 122 aa, Artificial Sequence; identical to SEQ ID NO: 2872
  Description of Artificial Sequence: Synthetic polypeptide
  VL of XENP021829

SEQ ID NO: 26710 - protein, 231 aa, Artificial Sequence; identical to SEQ ID NO: 2397
  Description of Artificial Sequence: Synthetic polypeptide
  Fc chain of XENP021829

SEQ ID NO: 26711 - protein, 11 aa, Artificial Sequence
  Description of Artificial Sequence: Synthetic peptide
  XENP021829 vhCDR1
RASQSVGNDVA

SEQ ID NO: 26712 - protein, 7 aa, Artificial Sequence
  Description of Artificial Sequence: Synthetic peptide
  XENP021829 vhCDR2
YASHRYT

SEQ ID NO: 26713 - protein, 9 aa, Artificial Sequence
  Description of Artificial Sequence: Synthetic peptide
  XENP021829 vhCDR3
QQDFSSPRT

SEQ ID NO: 26714 - protein, 5 aa, Artificial Sequence
  Description of Artificial Sequence: Synthetic peptide
  XENP021829 vlCDR1
NYWMN

SEQ ID NO: 26715 - protein, 19 aa, Artificial Sequence
  Description of Artificial Sequence: Synthetic peptide
  XENP021829 vlCDR2
EIRLYSNNYATHYAESVKG

SEQ ID NO: 26716 - protein, 11 aa, Artificial Sequence
  Description of Artificial Sequence: Synthetic peptide
  XENP021829 vlCDR3
YYGNYGGYFDV

SEQ ID NO: 26717 - protein, 219 aa, Artificial Sequence; identical to SEQ ID NO: 26317
  Description of Artificial Sequence: Synthetic polypeptide
  XENP021829 GSK_88.2[ICOS]_H0L0_Fab-1G6_L1.194_H1.279_scFv Light Chain

SEQ ID NO: 26718 - protein, 112 aa, Artificial Sequence; identical to SEQ ID NO: 26318
  Description of Artificial Sequence: Synthetic polypeptide
  VL of XENP021829

SEQ ID NO: 26719 - protein, 16 aa, Artificial Sequence
  Description of Artificial Sequence: Synthetic peptide
  XENP021829 vlCDR1
RSSKSLLHSNGNTYLY

SEQ ID NO: 26720 - protein, 7 aa, Artificial Sequence
  Description of Artificial Sequence: Synthetic peptide
  XENP021829 vlCDR2
RMSNLAS

SEQ ID NO: 26721 - protein, 9 aa, Artificial Sequence
  Description of Artificial Sequence: Synthetic peptide
  XENP021829 vlCDR3
MQHLEYPWT

SEQ ID NO: 26722 - protein, 454 aa, Artificial Sequence
  Description of Artificial Sequence: Synthetic polypeptide
  XENP021830 jMab-138[ICOS]_H0L0_Fab-1G6_L1.194_H1.279_scFv Fab-Fc Heavy Chain
EVQLVESGGGLVQPGGSLRLSCAASGFTFSSYDMHWVRQATGKGLEWVSAIGTAGDTYYPGSVKGRFTISRENAKNSLYLQMNSLRAGDTAVYYCVRDNRKVTHEHYYYYGMDVWGQGTTVTVSSASTKGPSVFPLAPSSKSTSGGTAALGCLVKDYFPEPVTVSWNSGALTSGVHTFPAVLQSSGLYSLSSVVTVPSSSLGTQTYICNVNHKPSDTKVDKKVEPKSCDKTHTCPPCPAPPVAGPSVFLFPPKPKDTLMISRTPEVTCVVVDVKHEDPEVKFNWYVDGVEVHNAKTKPREEEYNSTYRVVSVLTVLHQDWLNGKEYKCKVSNKALPAPIEKTISKAKGQPREPQVYTLPPSREEMTKNQVSLTCDVSGFYPSDIAVEWESDGQPENNYKTTPPVLDSDGSFFLYSKLTVDKSRWEQGDVFSCSVMHEALHNHYTQKSLSLSPGK

SEQ ID NO: 26723 - protein, 125 aa, Artificial Sequence; identical to SEQ ID NO: 26323
  Description of Artificial Sequence: Synthetic polypeptide
  VH of XENP021830

SEQ ID NO: 26724 - protein, 5 aa, Artificial Sequence
  Description of Artificial Sequence: Synthetic peptide
  XENP021830 vhCDR1
SYDMH

SEQ ID NO: 26725 - protein, 16 aa, Artificial Sequence
  Description of Artificial Sequence: Synthetic peptide
  XENP021830 vhCDR2
AIGTAGDTYYPGSVKG

SEQ ID NO: 26726 - protein, 17 aa, Artificial Sequence
  Description of Artificial Sequence: Synthetic peptide
  XENP021830 vhCDR3
DNRKVTHEHYYYYGMDV

SEQ ID NO: 26727 - protein, 480 aa, Artificial Sequence; identical to SEQ ID NO: 2870
  Description of Artificial Sequence: Synthetic polypeptide
  XENP021830 jMab-138[ICOS]_H0L0_Fab-1G6_L1.194_H1.279_scFv scFv-Fc Heavy Chain

SEQ ID NO: 26728 - protein, 107 aa, Artificial Sequence; identical to SEQ ID NO: 2871
  Description of Artificial Sequence: Synthetic polypeptide
  VH of XENP021830

SEQ ID NO: 26729 - protein, 122 aa, Artificial Sequence; identical to SEQ ID NO: 2872
  Description of Artificial Sequence: Synthetic polypeptide
  VL of XENP021830

SEQ ID NO: 26730 - protein, 231 aa, Artificial Sequence; identical to SEQ ID NO: 2397
  Description of Artificial Sequence: Synthetic polypeptide
  Fc chain of XENP021830

SEQ ID NO: 26731 - protein, 11 aa, Artificial Sequence
  Description of Artificial Sequence: Synthetic peptide
  XENP021830 vhCDR1
RASQSVGNDVA

SEQ ID NO: 26732 - protein, 7 aa, Artificial Sequence
  Description of Artificial Sequence: Synthetic peptide
  XENP021830 vhCDR2
YASHRYT

SEQ ID NO: 26733 - protein, 9 aa, Artificial Sequence
  Description of Artificial Sequence: Synthetic peptide
  XENP021830 vhCDR3
QQDFSSPRT

SEQ ID NO: 26734 - protein, 5 aa, Artificial Sequence
  Description of Artificial Sequence: Synthetic peptide
  XENP021830 vlCDR1
NYWMN

SEQ ID NO: 26735 - protein, 19 aa, Artificial Sequence
  Description of Artificial Sequence: Synthetic peptide
  XENP021830 vlCDR2
EIRLYSNNYATHYAESVKG

SEQ ID NO: 26736 - protein, 11 aa, Artificial Sequence
  Description of Artificial Sequence: Synthetic peptide
  XENP021830 vlCDR3
YYGNYGGYFDV

SEQ ID NO: 26737 - protein, 216 aa, Artificial Sequence; identical to SEQ ID NO: 26327
  Description of Artificial Sequence: Synthetic polypeptide
  XENP021830 jMab-138[ICOS]_H0L0_Fab-1G6_L1.194_H1.279_scFv Light Chain

SEQ ID NO: 26738 - protein, 109 aa, Artificial Sequence; identical to SEQ ID NO: 26328
  Description of Artificial Sequence: Synthetic polypeptide
  VL of XENP021830

SEQ ID NO: 26739 - protein, 12 aa, Artificial Sequence
  Description of Artificial Sequence: Synthetic peptide
  XENP021830 vlCDR1
RASQNIRSSYLA

SEQ ID NO: 26740 - protein, 7 aa, Artificial Sequence
  Description of Artificial Sequence: Synthetic peptide
  XENP021830 vlCDR2
GASSRAT

SEQ ID NO: 26741 - protein, 10 aa, Artificial Sequence
  Description of Artificial Sequence: Synthetic peptide
  XENP021830 vlCDR3
QQFGSSPMCS

SEQ ID NO: 26742 - protein, 454 aa, Artificial Sequence
  Description of Artificial Sequence: Synthetic polypeptide
  XENP021831 jMab-139[ICOS]_H0L0_Fab-1G6_L1.194_H1.279_scFv Fab-Fc Heavy Chain
EVQLVESGGGLVQPGGSLRLSCAASGFTFSSYDMHWVRQATGKGLEWVSAIGTAGDTYYPGSVKGRFTISRENAKNSLYLQMNSLRAGDTAVYYCVRDKRTVTHEHYYYYGMDVWGQGTTVTVSSASTKGPSVFPLAPSSKSTSGGTAALGCLVKDYFPEPVTVSWNSGALTSGVHTFPAVLQSSGLYSLSSVVTVPSSSLGTQTYICNVNHKPSDTKVDKKVEPKSCDKTHTCPPCPAPPVAGPSVFLFPPKPKDTLMISRTPEVTCVVVDVKHEDPEVKFNWYVDGVEVHNAKTKPREEEYNSTYRVVSVLTVLHQDWLNGKEYKCKVSNKALPAPIEKTISKAKGQPREPQVYTLPPSREEMTKNQVSLTCDVSGFYPSDIAVEWESDGQPENNYKTTPPVLDSDGSFFLYSKLTVDKSRWEQGDVFSCSVMHEALHNHYTQKSLSLSPGK

SEQ ID NO: 26743 - protein, 125 aa, Artificial Sequence; identical to SEQ ID NO: 26333
  Description of Artificial Sequence: Synthetic polypeptide
  VH of XENP021831

SEQ ID NO: 26744 - protein, 5 aa, Artificial Sequence
  Description of Artificial Sequence: Synthetic peptide
  XENP021831 vhCDR1
SYDMH

SEQ ID NO: 26745 - protein, 16 aa, Artificial Sequence
  Description of Artificial Sequence: Synthetic peptide
  XENP021831 vhCDR2
AIGTAGDTYYPGSVKG

SEQ ID NO: 26746 - protein, 17 aa, Artificial Sequence
  Description of Artificial Sequence: Synthetic peptide
  XENP021831 vhCDR3
DKRTVTHEHYYYYGMDV

SEQ ID NO: 26747 - protein, 480 aa, Artificial Sequence; identical to SEQ ID NO: 2870
  Description of Artificial Sequence: Synthetic polypeptide
  XENP021831 jMab-139[ICOS]_H0L0_Fab-1G6_L1.194_H1.279_scFv scFv-Fc Heavy Chain

SEQ ID NO: 26748 - protein, 107 aa, Artificial Sequence; identical to SEQ ID NO: 2871
  Description of Artificial Sequence: Synthetic polypeptide
  VH of XENP021831

SEQ ID NO: 26749 - protein, 122 aa, Artificial Sequence; identical to SEQ ID NO: 2872
  Description of Artificial Sequence: Synthetic polypeptide
  VL of XENP021831

SEQ ID NO: 26750 - protein, 231 aa, Artificial Sequence; identical to SEQ ID NO: 2397
  Description of Artificial Sequence: Synthetic polypeptide
  Fc chain of XENP021831

SEQ ID NO: 26751 - protein, 11 aa, Artificial Sequence
  Description of Artificial Sequence: Synthetic peptide
  XENP021831 vhCDR1
RASQSVGNDVA

SEQ ID NO: 26752 - protein, 7 aa, Artificial Sequence
  Description of Artificial Sequence: Synthetic peptide
  XENP021831 vhCDR2
YASHRYT

SEQ ID NO: 26753 - protein, 9 aa, Artificial Sequence
  Description of Artificial Sequence: Synthetic peptide
  XENP021831 vhCDR3
QQDFSSPRT

SEQ ID NO: 26754 - protein, 5 aa, Artificial Sequence
  Description of Artificial Sequence: Synthetic peptide
  XENP021831 vlCDR1
NYWMN

SEQ ID NO: 26755 - protein, 19 aa, Artificial Sequence
  Description of Artificial Sequence: Synthetic peptide
  XENP021831 vlCDR2
EIRLYSNNYATHYAESVKG

SEQ ID NO: 26756 - protein, 11 aa, Artificial Sequence
  Description of Artificial Sequence: Synthetic peptide
  XENP021831 vlCDR3
YYGNYGGYFDV

SEQ ID NO: 26757 - protein, 216 aa, Artificial Sequence; identical to SEQ ID NO: 26337
  Description of Artificial Sequence: Synthetic polypeptide
  XENP021831 jMab-139[ICOS]_H0L0_Fab-1G6_L1.194_H1.279_scFv Light Chain

SEQ ID NO: 26758 - protein, 109 aa, Artificial Sequence; identical to SEQ ID NO: 26338
  Description of Artificial Sequence: Synthetic polypeptide
  VL of XENP021831

SEQ ID NO: 26759 - protein, 12 aa, Artificial Sequence
  Description of Artificial Sequence: Synthetic peptide
  XENP021831 vlCDR1
RASQSISSSSLA

SEQ ID NO: 26760 - protein, 7 aa, Artificial Sequence
  Description of Artificial Sequence: Synthetic peptide
  XENP021831 vlCDR2
GASSRAT

SEQ ID NO: 26761 - protein, 10 aa, Artificial Sequence
  Description of Artificial Sequence: Synthetic peptide
  XENP021831 vlCDR3
QQFGSSPMCS

SEQ ID NO: 26762 - protein, 450 aa, Artificial Sequence
  Description of Artificial Sequence: Synthetic polypeptide
  XENP022348 WO2016059602_GSK_H0L0_Fab-1G6_L1.194_H1.279_scFv Fab-Fc Heavy Chain
QVQLVQSGAEVKKPGSSVKVSCKASGYTFTDYAMHWVRQAPGQGLEWMGLISIYSDHTNYNQKFQGRVTITADKSTSTAYMELSSLRSEDTAVYYCGRNNYGNYGWYFDVWGQGTTVTVSSASTKGPSVFPLAPSSKSTSGGTAALGCLVKDYFPEPVTVSWNSGALTSGVHTFPAVLQSSGLYSLSSVVTVPSSSLGTQTYICNVNHKPSDTKVDKKVEPKSCDKTHTCPPCPAPPVAGPSVFLFPPKPKDTLMISRTPEVTCVVVDVKHEDPEVKFNWYVDGVEVHNAKTKPREEEYNSTYRVVSVLTVLHQDWLNGKEYKCKVSNKALPAPIEKTISKAKGQPREPQVYTLPPSREEMTKNQVSLTCDVSGFYPSDIAVEWESDGQPENNYKTTPPVLDSDGSFFLYSKLTVDKSRWEQGDVFSCSVMHEALHNHYTQKSLSLSPGK

SEQ ID NO: 26763 - protein, 121 aa, Artificial Sequence; identical to SEQ ID NO: 26343
  Description of Artificial Sequence: Synthetic polypeptide
  VH of XENP022348

SEQ ID NO: 26764 - protein, 5 aa, Artificial Sequence
  Description of Artificial Sequence: Synthetic peptide
  XENP022348 vhCDR1
DYAMH

SEQ ID NO: 26765 - protein, 17 aa, Artificial Sequence
  Description of Artificial Sequence: Synthetic peptide
  XENP022348 vhCDR2
LISIYSDHTNYNQKFQG

SEQ ID NO: 26766 - protein, 12 aa, Artificial Sequence
  Description of Artificial Sequence: Synthetic peptide
  XENP022348 vhCDR3
NNYGNYGWYFDV

SEQ ID NO: 26767 - protein, 480 aa, Artificial Sequence; identical to SEQ ID NO: 2870
  Description of Artificial Sequence: Synthetic polypeptide
  XENP022348 WO2016059602_GSK_H0L0_Fab-1G6_L1.194_H1.279_scFv scFv-Fc Heavy Chain

SEQ ID NO: 26768 - protein, 107 aa, Artificial Sequence; identical to SEQ ID NO: 2871
  Description of Artificial Sequence: Synthetic polypeptide
  VH of XENP022348

SEQ ID NO: 26769 - protein, 122 aa, Artificial Sequence; identical to SEQ ID NO: 2872
  Description of Artificial Sequence: Synthetic polypeptide
  VL of XENP022348

SEQ ID NO: 26770 - protein, 231 aa, Artificial Sequence; identical to SEQ ID NO: 2397
  Description of Artificial Sequence: Synthetic polypeptide
  Fc chain of XENP022348

SEQ ID NO: 26771 - protein, 11 aa, Artificial Sequence
  Description of Artificial Sequence: Synthetic peptide
  XENP022348 vhCDR1
RASQSVGNDVA

SEQ ID NO: 26772 - protein, 7 aa, Artificial Sequence
  Description of Artificial Sequence: Synthetic peptide
  XENP022348 vhCDR2
YASHRYT

SEQ ID NO: 26773 - protein, 9 aa, Artificial Sequence
  Description of Artificial Sequence: Synthetic peptide
  XENP022348 vhCDR3
QQDFSSPRT

SEQ ID NO: 26774 - protein, 5 aa, Artificial Sequence
  Description of Artificial Sequence: Synthetic peptide
  XENP022348 vlCDR1
NYWMN

SEQ ID NO: 26775 - protein, 19 aa, Artificial Sequence
  Description of Artificial Sequence: Synthetic peptide
  XENP022348 vlCDR2
EIRLYSNNYATHYAESVKG

SEQ ID NO: 26776 - protein, 11 aa, Artificial Sequence
  Description of Artificial Sequence: Synthetic peptide
  XENP022348 vlCDR3
YYGNYGGYFDV

SEQ ID NO: 26777 - protein, 213 aa, Artificial Sequence; identical to SEQ ID NO: 26347
  Description of Artificial Sequence: Synthetic polypeptide
  XENP022348 WO2016059602_GSK_H0L0_Fab-1G6_L1.194_H1.279_scFv Light Chain

SEQ ID NO: 26778 - protein, 106 aa, Artificial Sequence; identical to SEQ ID NO: 26348
  Description of Artificial Sequence: Synthetic polypeptide
  VL of XENP022348

SEQ ID NO: 26779 - protein, 10 aa, Artificial Sequence
  Description of Artificial Sequence: Synthetic peptide
  XENP022348 vlCDR1
SASSSVSYMH

SEQ ID NO: 26780 - protein, 7 aa, Artificial Sequence
  Description of Artificial Sequence: Synthetic peptide
  XENP022348 vlCDR2
DTSKLAS

SEQ ID NO: 26781 - protein, 9 aa, Artificial Sequence
  Description of Artificial Sequence: Synthetic peptide
  XENP022348 vlCDR3
FQGSGYPYT

SEQ ID NO: 26782 - protein, 446 aa, Artificial Sequence
  Description of Artificial Sequence: Synthetic polypeptide
  XENP023059 Jounce_37A10S713[ICOS]_H0L0_Fab-1G6_[PD-1]_L1.194 _H1.279_scFv Fab-Fc Heavy Chain
EVQLVESGGGLVQPGGSLRLSCAASGFTFSDYWMDWVRQAPGKGLVWVSNIDEDGSITEYSPFVKGRFTISRDNAKNTLYLQMNSLRAEDTAVYYCTRWGRFGFDSWGQGTLVTVSSASTKGPSVFPLAPSSKSTSGGTAALGCLVKDYFPEPVTVSWNSGALTSGVHTFPAVLQSSGLYSLSSVVTVPSSSLGTQTYICNVNHKPSDTKVDKKVEPKSCDKTHTCPPCPAPPVAGPSVFLFPPKPKDTLMISRTPEVTCVVVDVKHEDPEVKFNWYVDGVEVHNAKTKPREEEYNSTYRVVSVLTVLHQDWLNGKEYKCKVSNKALPAPIEKTISKAKGQPREPQVYTLPPSREEMTKNQVSLTCDVSGFYPSDIAVEWESDGQPENNYKTTPPVLDSDGSFFLYSKLTVDKSRWEQGDVFSCSVMHEALHNHYTQKSLSLSPGK

SEQ ID NO: 26783 - protein, 117 aa, Artificial Sequence; identical to SEQ ID NO: 26353
  Description of Artificial Sequence: Synthetic polypeptide
  VH of XENP023059

SEQ ID NO: 26784 - protein, 5 aa, Artificial Sequence
  Description of Artificial Sequence: Synthetic peptide
  XENP023059 vhCDR1
DYWMD

SEQ ID NO: 26785 - protein, 17 aa, Artificial Sequence
  Description of Artificial Sequence: Synthetic peptide
  XENP023059 vhCDR2
NIDEDGSITEYSPFVKG

SEQ ID NO: 26786 - protein, 8 aa, Artificial Sequence
  Description of Artificial Sequence: Synthetic peptide
  XENP023059 vhCDR3
WGRFGFDS

SEQ ID NO: 26787 - protein, 480 aa, Artificial Sequence; identical to SEQ ID NO: 2870
  Description of Artificial Sequence: Synthetic polypeptide
  XENP023059 Jounce_37A10S713[ICOS]_H0L0_Fab-1G6_[PD-1]_L1.194 _H1.279_scFv scFv-Fc Heavy Chain

SEQ ID NO: 26788 - protein, 107 aa, Artificial Sequence; identical to SEQ ID NO: 2871
  Description of Artificial Sequence: Synthetic polypeptide
  VH of XENP023059

SEQ ID NO: 26789 - protein, 122 aa, Artificial Sequence; identical to SEQ ID NO: 2872
  Description of Artificial Sequence: Synthetic polypeptide
  VL of XENP023059

SEQ ID NO: 26790 - protein, 231 aa, Artificial Sequence; identical to SEQ ID NO: 2397
  Description of Artificial Sequence: Synthetic polypeptide
  Fc chain of XENP023059

SEQ ID NO: 26791 - protein, 11 aa, Artificial Sequence
  Description of Artificial Sequence: Synthetic peptide
  XENP023059 vhCDR1
RASQSVGNDVA

SEQ ID NO: 26792 - protein, 7 aa, Artificial Sequence
  Description of Artificial Sequence: Synthetic peptide
  XENP023059 vhCDR2
YASHRYT

SEQ ID NO: 26793 - protein, 9 aa, Artificial Sequence
  Description of Artificial Sequence: Synthetic peptide
  XENP023059 vhCDR3
QQDFSSPRT

SEQ ID NO: 26794 - protein, 5 aa, Artificial Sequence
  Description of Artificial Sequence: Synthetic peptide
  XENP023059 vlCDR1
NYWMN

SEQ ID NO: 26795 - protein, 19 aa, Artificial Sequence
  Description of Artificial Sequence: Synthetic peptide
  XENP023059 vlCDR2
EIRLYSNNYATHYAESVKG

SEQ ID NO: 26796 - protein, 11 aa, Artificial Sequence
  Description of Artificial Sequence: Synthetic peptide
  XENP023059 vlCDR3
YYGNYGGYFDV

SEQ ID NO: 26797 - protein, 218 aa, Artificial Sequence; identical to SEQ ID NO: 26357
  Description of Artificial Sequence: Synthetic polypeptide
  XENP023059 Jounce_37A10S713[ICOS]_H0L0_Fab-1G6_[PD-1]_L1.194 _H1.279_scFv Light Chain

SEQ ID NO: 26798 - protein, 111 aa, Artificial Sequence; identical to SEQ ID NO: 26358
  Description of Artificial Sequence: Synthetic polypeptide
  VL of XENP023059

SEQ ID NO: 26799 - protein, 15 aa, Artificial Sequence
  Description of Artificial Sequence: Synthetic peptide
  XENP023059 vlCDR1
KSSQSLLSGSFNYLT

SEQ ID NO: 26800 - protein, 7 aa, Artificial Sequence
  Description of Artificial Sequence: Synthetic peptide
  XENP023059 vlCDR2
YASTRHT

SEQ ID NO: 26801 - protein, 9 aa, Artificial Sequence
  Description of Artificial Sequence: Synthetic peptide
  XENP023059 vlCDR3
HHHYNAPPT

SEQ ID NO: 26802 - protein, 442 aa, Artificial Sequence
  Description of Artificial Sequence: Synthetic polypeptide
  XENP018920 nivolumab[PD-1]_H0L0_Fab-[anti-ICOS]_H0L0 _scFv Fab-Fc Heavy Chain
QVQLVESGGGVVQPGRSLRLDCKASGITFSNSGMHWVRQAPGKGLEWVAVIWYDGSKRYYADSVKGRFTISRDNSKNTLFLQMNSLRAEDTAVYYCATNDDYWGQGTLVTVSSASTKGPSVFPLAPSSKSTSGGTAALGCLVKDYFPEPVTVSWNSGALTSGVHTFPAVLQSSGLYSLSSVVTVPSSSLGTQTYICNVNHKPSDTKVDKKVEPKSCDKTHTCPPCPAPPVAGPSVFLFPPKPKDTLMISRTPEVTCVVVDVKHEDPEVKFNWYVDGVEVHNAKTKPREEEYNSTYRVVSVLTVLHQDWLNGKEYKCKVSNKALPAPIEKTISKAKGQPREPQVYTLPPSREEMTKNQVSLTCDVSGFYPSDIAVEWESDGQPENNYKTTPPVLDSDGSFFLYSKLTVDKSRWEQGDVFSCSVMHEALHNHYTQKSLSLSPGK

SEQ ID NO: 26803 - protein, 113 aa, Artificial Sequence [sequence omitted]

SEQ ID NO: 26804 - protein, 5 aa, Artificial Sequence
  Description of Artificial Sequence: Synthetic peptide
  XENP018920 vhCDR1
NSGMH

SEQ ID NO: 26805 - protein, 17 aa, Artificial Sequence
  Description of Artificial Sequence: Synthetic peptide
  XENP018920 vhCDR2
VIWYDGSKRYYADSVKG

SEQ ID NO: 26806 - protein, 4 aa, Artificial Sequence
  Description of Artificial Sequence: Synthetic peptide
  XENP018920 vhCDR3
NDDY

SEQ ID NO: 26807 - protein, 471 aa, Artificial Sequence
  Description of Artificial Sequence: Synthetic polypeptide
  XENP018920 nivolumab[PD-1]_H0L0_Fab-[anti-ICOS]_H0L0 _scFv scFv-Fc Heavy Chain
QVQLVESGGGVVQPGRSLRLSCKASGITFSNSGMHWVRQAPGKGLEWVAVIWYDGSKRYYADSVKGRFTISRDNSKNTLFLQMNSLRAEDTAVYYCATNDDYWGQGTLVTVSSGKPGSGKPGSGKPGSGKPGSEIVLTQSPATLSLSPGERATLSCRASQSVSSYLAWYQQKPGQAPRLLIYDASNRATGIPARFSGSGSGTDFTLTISSLEPEDFAVYYCQQSSNWPRTFGQGTKVEIKEPKSSDKTHTCPPCPAPPVAGPSVFLFPPKPKDTLMISRTPEVTCVVVDVKHEDPEVKFNWYVDGVEVHNAKTKPREEQYNSTYRVVSVLTVLHQDWLNGKEYKCKVSNKALPAPIEKTISKAKGQPREPQVYTLPPSREQMTKNQVKLTCLVKGFYPSDIAVEWESNGQPENNYKTTPPVLDSDGSFFLYSKLTVDKSRWQQGNVFSCSVMHEALHNHYTQKSLSLSPGK

SEQ ID NO: 26808 - protein, 113 aa, Artificial Sequence; identical to SEQ ID NO: 10886
  Description of Artificial Sequence: Synthetic polypeptide
  VH of XENP018920

SEQ ID NO: 26809 - protein, 107 aa, Artificial Sequence [sequence omitted]

SEQ ID NO: 26810 - protein, 231 aa, Artificial Sequence; identical to SEQ ID NO: 2397
  Description of Artificial Sequence: Synthetic polypeptide
  Fc chain of XENP018920

SEQ ID NO: 26811 - protein, 5 aa, Artificial Sequence
  Description of Artificial Sequence: Synthetic peptide
  XENP018920 vhCDR1
NSGMH

SEQ ID NO: 26812 - protein, 17 aa, Artificial Sequence
  Description of Artificial Sequence: Synthetic peptide
  XENP018920 vhCDR2
VIWYDGSKRYYADSVKG

SEQ ID NO: 26813 - protein, 4 aa, Artificial Sequence
  Description of Artificial Sequence: Synthetic peptide
  XENP018920 vhCDR3
NDDY

SEQ ID NO: 26814 - protein, 11 aa, Artificial Sequence
  Description of Artificial Sequence: Synthetic peptide
  XENP018920 vlCDR1
RASQSVSSYLA

SEQ ID NO: 26815 - protein, 7 aa, Artificial Sequence
  Description of Artificial Sequence: Synthetic peptide
  XENP018920 vlCDR2
DASNRAT

SEQ ID NO: 26816 - protein, 9 aa, Artificial Sequence
  Description of Artificial Sequence: Synthetic peptide
  XENP018920 vlCDR3
QQSSNWPRT

SEQ ID NO: 26817 - protein, 214 aa, Artificial Sequence; identical to SEQ ID NO: 16146
  Description of Artificial Sequence: Synthetic polypeptide
  XENP018920 nivolumab[PD-1]_H0L0_Fab-[anti-ICOS]_H0L0 _scFv Light Chain

SEQ ID NO: 26818 - protein, 107 aa, Artificial Sequence [sequence omitted]

SEQ ID NO: 26819 - protein, 11 aa, Artificial Sequence
  Description of Artificial Sequence: Synthetic peptide
  XENP018920 vlCDR1
RASQSVSSYLA

SEQ ID NO: 26820 - protein, 7 aa, Artificial Sequence
  Description of Artificial Sequence: Synthetic peptide
  XENP018920 vlCDR2
DASNRAT

SEQ ID NO: 26821 - protein, 9 aa, Artificial Sequence
  Description of Artificial Sequence: Synthetic peptide
  XENP018920 vlCDR3
QQSSNWPRT

SEQ ID NO: 26822 - protein, 456 aa, Artificial Sequence
  Description of Artificial Sequence: Synthetic polypeptide
  XENP024130 LOPD180[PD-1]_H1L1_Fab-[anti-ICOS]_H0L0 _scFv Fab-Fc Heavy Chain
QVQLQESGPGLVKPSQTLSLTCTVSGGSISSGAYYWSWIRQHPGKGLEWIGYIYYNGNTYYNPSLRSRVTISVDTSKNQFSLKLSSVTAADTAVYYCVRASDYVWGGYHYFDAFDLWGRGTLVTVSSASTKGPSVFPLAPSSKSTSGGTAALGCLVKDYFPEPVTVSWNSGALTSGVHTFPAVLQSSGLYSLSSVVTVPSSSLGTQTYICNVNHKPSDTKVDKKVEPKSCDKTHTCPPCPAPPVAGPSVFLFPPKPKDTLMISRTPEVTCVVVDVKHEDPEVKFNWYVDGVEVHNAKTKPREEEYNSTYRVVSVLTVLHQDWLNGKEYKCKVSNKALPAPIEKTISKAKGQPREPQVYTLPPSREEMTKNQVSLTCDVSGFYPSDIAVEWESDGQPENNYKTTPPVLDSDGSFFLYSKLTVDKSRWEQGDVFSCSVMHEALHNHYTQKSLSLSPGK

SEQ ID NO: 26823 - protein, 127 aa, Artificial Sequence
  Description of Artificial Sequence: Synthetic polypeptide
  VH of XENP024130
QVQLQESGPGLVKPSQTLSLTCTVSGGSISSGAYYWSWIRQHPGKGLEWIGYIYYNGNTYYNPSLRSRVTISVDTSKNQFSLKLSSVTAADTAVYYCVRASDYVWGGYHYFDAFDLWGRGTLVTVSS

SEQ ID NO: 26824 - protein, 7 aa, Artificial Sequence
  Description of Artificial Sequence: Synthetic peptide
  XENP024130 vhCDR1
SGAYYWS

SEQ ID NO: 26825 - protein, 16 aa, Artificial Sequence
  Description of Artificial Sequence: Synthetic peptide
  XENP024130 vhCDR2
YIYYNGNTYYNPSLRS

SEQ ID NO: 26826 - protein, 17 aa, Artificial Sequence
  Description of Artificial Sequence: Synthetic peptide
  XENP024130 vhCDR3
ASDYVWGGYHYFDAFDL

SEQ ID NO: 26827 - protein, 483 aa, Artificial Sequence
  Description of Artificial Sequence: Synthetic polypeptide
  XENP024130 LOPD180[PD-1]_H1L1_Fab-[anti-ICOS]_H0L0 _scFv scFv-Fc Heavy Chain
QVQLVQSGAEVKKPGASVKVSCKASGYTFTGYYMHWVRQAPGQGLEWMGWINPHSGGTNYAQKFQGRVTMTRDTSISTAYMELSRLRSDDTAVYYCARTYYYDSSGYYHDAFDIWGQGTMVTVSSGKPGSGKPGSGKPGSGKPGSDIQMTQSPSSVSASVGDRVTITCRASQGISRLLAWYQQKPGKAPKLLIYVASSLQSGVPSRFSGSGSGTDFTLTISSLQPEDFATYYCQQANSFPWTFGQGTKVEIKEPKSSDKTHTCPPCPAPPVAGPSVFLFPPKPKDTLMISRTPEVTCVVVDVKHEDPEVKFNWYVDGVEVHNAKTKPREEQYNSTYRVVSVLTVLHQDWLNGKEYKCKVSNKALPAPIEKTISKAKGQPREPQVYTLPPSREQMTKNQVKLTCLVKGFYPSDIAVEWESNGQPENNYKTTPPVLDSDGSFFLYSKLTVDKSRWQQGNVFSCSVMHEALHNHYTQKSLSLSPGK

SEQ ID NO: 26828 - protein, 125 aa, Artificial Sequence; identical to SEQ ID NO: 26293
  Description of Artificial Sequence: Synthetic polypeptide
  VH of XENP024130

SEQ ID NO: 26829 - protein, 107 aa, Artificial Sequence; identical to SEQ ID NO: 26298
  Description of Artificial Sequence: Synthetic polypeptide
  VL of XENP024130

SEQ ID NO: 26830 - protein, 231 aa, Artificial Sequence; identical to SEQ ID NO: 2397
  Description of Artificial Sequence: Synthetic polypeptide
  Fc chain of XENP024130

SEQ ID NO: 26831 - protein, 5 aa, Artificial Sequence
  Description of Artificial Sequence: Synthetic peptide
  XENP024130 vhCDR1
GYYMH

SEQ ID NO: 26832 - protein, 17 aa, Artificial Sequence
  Description of Artificial Sequence: Synthetic peptide
  XENP024130 vhCDR2
WINPHSGGTNYAQKFQG

SEQ ID NO: 26833 - protein, 16 aa, Artificial Sequence
  Description of Artificial Sequence: Synthetic peptide
  XENP024130 vhCDR3
TYYYDSSGYYHDAFDI

SEQ ID NO: 26834 - protein, 11 aa, Artificial Sequence
  Description of Artificial Sequence: Synthetic peptide
  XENP024130 vlCDR1
RASQGISRLLA

SEQ ID NO: 26835 - protein, 7 aa, Artificial Sequence
  Description of Artificial Sequence: Synthetic peptide
  XENP024130 vlCDR2
VASSLQS

SEQ ID NO: 26836 - protein, 9 aa, Artificial Sequence
  Description of Artificial Sequence: Synthetic peptide
  XENP024130 vlCDR3
QQANSFPWT

SEQ ID NO: 26837 - protein, 216 aa, Artificial Sequence
  Description of Artificial Sequence: Synthetic polypeptide
  XENP024130 LOPD180[PD-1]_H1L1_Fab-[anti-ICOS]_H0L0 _scFv Light Chain
QSVLTQPPSASGTPGQRVTISCSGSNSNIGSNSVNWYQQLPGTAPKLLIYGNNQRPSGVPDRFSGSKSGTSASLAISGLQSEDEADYYCAAWDDSLNGPVFGGGTKVTVLGQPKAAPSVTLFPPSSEELQANKATLVCLISDFYPGAVTVAWKADSSPVKAGVETTTPSKQSNNKYAASSYLSLTPEQWKSHRSYSCQVTHEGSTVEKTVAPTECS

SEQ ID NO: 26838 - protein, 110 aa, Artificial Sequence
  Description of Artificial Sequence: Synthetic polypeptide
  VL of XENP024130
QSVLTQPPSASGTPGQRVTISCSGSNSNIGSNSVNWYQQLPGTAPKLLIYGNNQRPSGVPDRFSGSKSGTSASLAISGLQSEDEADYYCAAWDDSLNGPVFGGGTKVTVL

SEQ ID NO: 26839 - protein, 13 aa, Artificial Sequence
  Description of Artificial Sequence: Synthetic peptide
  XENP024130 vlCDR1
SGSNSNIGSNSVN

SEQ ID NO: 26840 - protein, 7 aa, Artificial Sequence
  Description of Artificial Sequence: Synthetic peptide
  XENP024130 vlCDR2
GNNQRPS

SEQ ID NO: 26841 - protein, 11 aa, Artificial Sequence
  Description of Artificial Sequence: Synthetic peptide
  XENP024130 vlCDR3
AAWDDSLNGPV

SEQ ID NO: 26842 - protein, 454 aa, Artificial Sequence; identical to SEQ ID NO: 26442
  Description of Artificial Sequence: Synthetic polypeptide
  XENP023406 [anti-ICOS]_H0L0_Fab-[anti-ICOS]_H0L0 _Fab_1G6_L1.194_H1.279_scFv Fab-Fc Heavy Chain

SEQ ID NO: 26843 - protein, 125 aa, Artificial Sequence; identical to SEQ ID NO: 26293
  Description of Artificial Sequence: Synthetic polypeptide
  VH of XENP023406

SEQ ID NO: 26844 - protein, 5 aa, Artificial Sequence
  Description of Artificial Sequence: Synthetic peptide
  XENP023406 vhCDR1
GYYMH

SEQ ID NO: 26845 - protein, 17 aa, Artificial Sequence
  Description of Artificial Sequence: Synthetic peptide
  XENP023406 vhCDR2
WINPHSGGTNYAQKFQG

SEQ ID NO: 26846 - protein, 16 aa, Artificial Sequence
  Description of Artificial Sequence: Synthetic peptide
  XENP023406 vhCDR3
TYYYDSSGYYHDAFDI

SEQ ID NO: 26847 - protein, 722 aa, Artificial Sequence
  Description of Artificial Sequence: Synthetic polypeptide
  XENP023406 [anti-ICOS]_H0L0_Fab-[anti-ICOS]_H0L0 _Fab_1G6_L1.194_H1.279_scFv Fab-scFv-Fc Heavy Chain
QVQLVQSGAEVKKPGASVKVSCKASGYTFTGYYMHWVRQAPGQGLEWMGWINPHSGGTNYAQKFQGRVTMTRDTSISTAYMELSRLRSDDTAVYYCARTYYYDSSGYYHDAFDIWGQGTMVTVSSASTKGPSVFPLAPSSKSTSGGTAALGCLVKDYFPEPVTVSWNSGALTSGVHTFPAVLQSSGLYSLSSVVTVPSSSLGTQTYICNVNHKPSNTKVDKKVEPKSCGKPGSGKPGSEIVLTQSPATLSASPGERVTLTCRASQSVGNDVAWYQQKPGQAPRLLINYASHRYTGVPDRFTGSGYGTEFTLTISSVQSEDFGVYYCQQDFSSPRTFGGGTKVEIKGKPGSGKPGSGKPGSGKPGSEVQLVESGGGLVKPGGSLRLSCVASGFTFSNYWMNWVRQAPGKGLEWVAEIRLYSNNYATHYAESVKGRFTISRDDSKSTLYLQMNNLKTEDTGVYYCTRYYGNYGGYFDVWGRGTLVTVSSGGGGSGGGGSKTHTCPPCPAPPVAGPSVFLFPPKPKDTLMISRTPEVTCVVVDVKHEDPEVKFNWYVDGVEVHNAKTKPREEQYNSTYRVVSVLTVLHQDWLNGKEYKCKVSNKALPAPIEKTISKAKGQPREPQVYTLPPSREQMTKNQVKLTCLVKGFYPSDIAVEWESNGQPENNYKTTPPVLDSDGSFFLYSKLTVDKSRWQQGNVFSCSVMHEALHNHYTQKSLSLSPGK

SEQ ID NO: 26848 - protein, 125 aa, Artificial Sequence; identical to SEQ ID NO: 26293
  Description of Artificial Sequence: Synthetic polypeptide
  VH of XENP023406

SEQ ID NO: 26849 - protein, 113 aa, Artificial Sequence
  Description of Artificial Sequence: Synthetic polypeptide
  Fc chain of XENP023406
ASTKGPSVFPLAPSSKSTSGGTAALGCLVKDYFPEPVTVSWNSGALTSGVHTFPAVLQSSGLYSLSSVVTVPSSSLGTQTYICNVNHKPSNTKVDKKVEPKSCGKPGSGKPGS

SEQ ID NO: 26850 - protein, 107 aa, Artificial Sequence; identical to SEQ ID NO: 2871
  Description of Artificial Sequence: Synthetic polypeptide
  VL of XENP023406

SEQ ID NO: 26851 - protein, 225 aa, Artificial Sequence
  Description of Artificial Sequence: Synthetic polypeptide
  Fc chain of XENP023406
KTHTCPPCPAPPVAGPSVFLFPPKPKDTLMISRTPEVTCVVVDVKHEDPEVKFNWYVDGVEVHNAKTKPREEQYNSTYRVVSVLTVLHQDWLNGKEYKCKVSNKALPAPIEKTISKAKGQPREPQVYTLPPSREQMTKNQVKLTCLVKGFYPSDIAVEWESNGQPENNYKTTPPVLDSDGSFFLYSKLTVDKSRWQQGNVFSCSVMHEALHNHYTQKSLSLSPGK

SEQ ID NO: 26852 - protein, 5 aa, Artificial Sequence
  Description of Artificial Sequence: Synthetic peptide
  XENP023406 vhCDR1
GYYMH

SEQ ID NO: 26853 - protein, 17 aa, Artificial Sequence
  Description of Artificial Sequence: Synthetic peptide
  XENP023406 vhCDR2
WINPHSGGTNYAQKFQG

SEQ ID NO: 26854 - protein, 16 aa, Artificial Sequence
  Description of Artificial Sequence: Synthetic peptide
  XENP023406 vhCDR3
TYYYDSSGYYHDAFDI

SEQ ID NO: 26855 - protein, 11 aa, Artificial Sequence
  Description of Artificial Sequence: Synthetic peptide
  XENP023406 vlCDR1
RASQSVGNDVA

SEQ ID NO: 26856 - protein, 7 aa, Artificial Sequence
  Description of Artificial Sequence: Synthetic peptide
  XENP023406 vlCDR2
YASHRYT

SEQ ID NO: 26857 - protein, 9 aa, Artificial Sequence
  Description of Artificial Sequence: Synthetic peptide
  XENP023406 vlCDR3
QQDFSSPRT

SEQ ID NO: 26858 - protein, 214 aa, Artificial Sequence; identical to SEQ ID NO: 26297
  Description of Artificial Sequence: Synthetic polypeptide
  XENP023406 [anti-ICOS]_H0L0_Fab-[anti-ICOS]_H0L0 _Fab_1G6_L1.194_H1.279_scFv Light Chain

SEQ ID NO: 26859 - protein, 107 aa, Artificial Sequence; identical to SEQ ID NO: 26298
  Description of Artificial Sequence: Synthetic polypeptide
  VL of XENP023406

SEQ ID NO: 26860 - protein, 11 aa, Artificial Sequence
  Description of Artificial Sequence: Synthetic peptide
  XENP023406 vlCDR1
RASQGISRLLA

SEQ ID NO: 26861 - protein, 7 aa, Artificial Sequence
  Description of Artificial Sequence: Synthetic peptide
  XENP023406 vlCDR2
VASSLQS

SEQ ID NO: 26862 - protein, 9 aa, Artificial Sequence
  Description of Artificial Sequence: Synthetic peptide
  XENP023406 vlCDR3
QQANSFPWT

SEQ ID NO: 26863 - protein, 455 aa, Artificial Sequence
  Description of Artificial Sequence: Synthetic polypeptide
  XENP023407 [anti-ICOS]_H0L0_Fab-[anti-ICOS]_H0L0 _Fab_1G6_L1.194_H1.279_scFv Fab-Fc Heavy Chain
QVQLVQSGAEVKKPGASVKVSCKASGYTFTGYYMHWVRQAPGQGLEWMGWINPHSGGTNYAQKFQGRVTMTRDTSISTAYMELSRLRSDDTAVYYCARTYYYDSSGYYHDAFDIWGQGTMVTVSSASTKGPSVFPLAPSSKSTSGGTAALGCLVKDYFPEPVTVSWNSGALTSGVHTFPAVLQSSGLYSLSSVVTVPSSSLGTQTYICNVNHKPSDTKVDKKVEPKSCDKTHTCPPCPAPELLGGPSVFLFPPKPKDTLMISRTPEVTCVVVDVEHEDPEVKFNWYVDGVEVHNAKTKPREEEYNSTYRVVSVLTVLHQDWLNGKEYKCKVSNKAFPAPIEKTISKAKGQPREPQVYTLPPSREEMTKNQVSLTCDVSGFYPSDIAVEWESDGQPENNYKTTPPVLDSDGSFFLYSKLTVDKSRWEQGDVFSCSVMHEALHNHYTQKSLSLSPGK

SEQ ID NO: 26864 - protein, 125 aa, Artificial Sequence; identical to SEQ ID NO: 26293
  Description of Artificial Sequence: Synthetic polypeptide
  VH of XENP023407

SEQ ID NO: 26865 - protein, 5 aa, Artificial Sequence
  Description of Artificial Sequence: Synthetic peptide
  XENP023407 vhCDR1
GYYMH

SEQ ID NO: 26866 - protein, 17 aa, Artificial Sequence
  Description of Artificial Sequence: Synthetic peptide
  XENP023407 vhCDR2
WINPHSGGTNYAQKFQG

SEQ ID NO: 26867 - protein, 16 aa, Artificial Sequence
  Description of Artificial Sequence: Synthetic peptide
  XENP023407 vhCDR3
TYYYDSSGYYHDAFDI

SEQ ID NO: 26868 - protein, 723 aa, Artificial Sequence
  Description of Artificial Sequence: Synthetic polypeptide
  XENP023407 [anti-ICOS]_H0L0_Fab-[anti-ICOS]_H0L0 _Fab_1G6_L1.194_H1.279_scFv Fab-scFv-Fc Heavy Chain
QVQLVQSGAEVKKPGASVKVSCKASGYTFTGYYMHWVRQAPGQGLEWMGWINPHSGGTNYAQKFQGRVTMTRDTSISTAYMELSRLRSDDTAVYYCARTYYYDSSGYYHDAFDIWGQGTMVTVSSASTKGPSVFPLAPSSKSTSGGTAALGCLVKDYFPEPVTVSWNSGALTSGVHTFPAVLQSSGLYSLSSVVTVPSSSLGTQTYICNVNHKPSNTKVDKKVEPKSCGKPGSGKPGSEIVLTQSPATLSASPGERVTLTCRASQSVGNDVAWYQQKPGQAPRLLINYASHRYTGVPDRFTGSGYGTEFTLTISSVQSEDFGVYYCQQDFSSPRTFGGGTKVEIKGKPGSGKPGSGKPGSGKPGSEVQLVESGGGLVKPGGSLRLSCVASGFTFSNYWMNWVRQAPGKGLEWVAEIRLYSNNYATHYAESVKGRFTISRDDSKSTLYLQMNNLKTEDTGVYYCTRYYGNYGGYFDVWGRGTLVTVSSGGGGSGGGGSKTHTCPPCPAPELLGGPSVFLFPPKPKDTLMISRTPEVTCVVVDVEHEDPEVKFNWYVDGVEVHNAKTKPREEQYNSTYRVVSVLTVLHQDWLNGKEYKCKVSNKAFPAPIEKTISKAKGQPREPQVYTLPPSREQMTKNQVKLTCLVKGFYPSDIAVEWESNGQPENNYKTTPPVLDSDGSFFLYSKLTVDKSRWQQGNVFSCSVMHEALHNHYTQKSLSLSPGK

SEQ ID NO: 26869 - protein, 125 aa, Artificial Sequence; identical to SEQ ID NO: 26293
  Description of Artificial Sequence: Synthetic polypeptide
  VH of XENP023407

SEQ ID NO: 26870 - protein, 113 aa, Artificial Sequence; identical to SEQ ID NO: 26849
  Description of Artificial Sequence: Synthetic polypeptide
  Fc chain of XENP023407

SEQ ID NO: 26871 - protein, 107 aa, Artificial Sequence; identical to SEQ ID NO: 2871
  Description of Artificial Sequence: Synthetic polypeptide
  VL of XENP023407

SEQ ID NO: 26872 - protein, 226 aa, Artificial Sequence
  Description of Artificial Sequence: Synthetic polypeptide
  Fc chain of XENP023407
KTHTCPPCPAPELLGGPSVFLFPPKPKDTLMISRTPEVTCVVVDVEHEDPEVKFNWYVDGVEVHNAKTKPREEQYNSTYRVVSVLTVLHQDWLNGKEYKCKVSNKAFPAPIEKTISKAKGQPREPQVYTLPPSREQMTKNQVKLTCLVKGFYPSDIAVEWESNGQPENNYKTTPPVLDSDGSFFLYSKLTVDKSRWQQGNVFSCSVMHEALHNHYTQKSLSLSPGK

SEQ ID NO: 26873 - protein, 5 aa, Artificial Sequence
  Description of Artificial Sequence: Synthetic peptide
  XENP023407 vhCDR1
GYYMH

SEQ ID NO: 26874 - protein, 17 aa, Artificial Sequence
  Description of Artificial Sequence: Synthetic peptide
  XENP023407 vhCDR2
WINPHSGGTNYAQKFQG

SEQ ID NO: 26875 - protein, 16 aa, Artificial Sequence
  Description of Artificial Sequence: Synthetic peptide
  XENP023407 vhCDR3
TYYYDSSGYYHDAFDI

SEQ ID NO: 26876 - protein, 11 aa, Artificial Sequence
  Description of Artificial Sequence: Synthetic peptide
  XENP023407 vlCDR1
RASQSVGNDVA

SEQ ID NO: 26877 - protein, 7 aa, Artificial Sequence
  Description of Artificial Sequence: Synthetic peptide
  XENP023407 vlCDR2
YASHRYT

SEQ ID NO: 26878 - protein, 9 aa, Artificial Sequence
  Description of Artificial Sequence: Synthetic peptide
  XENP023407 vlCDR3
QQDFSSPRT

SEQ ID NO: 26879 - protein, 214 aa, Artificial Sequence; identical to SEQ ID NO: 26297
  Description of Artificial Sequence: Synthetic polypeptide
  XENP023407 [anti-ICOS]_H0L0_Fab-[anti-ICOS]_H0L0 _Fab_1G6_L1.194_H1.279_scFv Light Chain

SEQ ID NO: 26880 - protein, 107 aa, Artificial Sequence; identical to SEQ ID NO: 26298
  Description of Artificial Sequence: Synthetic polypeptide
  VL of XENP023407

SEQ ID NO: 26881 - protein, 11 aa, Artificial Sequence
  Description of Artificial Sequence: Synthetic peptide
  XENP023407 vlCDR1
RASQGISRLLA

SEQ ID NO: 26882 - protein, 7 aa, Artificial Sequence
  Description of Artificial Sequence: Synthetic peptide
  XENP023407 vlCDR2
VASSLQS

SEQ ID NO: 26883 - protein, 9 aa, Artificial Sequence
  Description of Artificial Sequence: Synthetic peptide
  XENP023407 vlCDR3
QQANSFPWT

SEQ ID NO: 26884 - protein, 451 aa, Artificial Sequence
  Description of Artificial Sequence: Synthetic polypeptide
  XENP024128 1G6_L1.194_H1.279_Fab-1G6_L1.194_H1.279 _Fab_[anti-ICOS]_H0L0_scFv Fab-Fc Heavy Chain
EVQLVESGGGLVKPGGSLRLSCVASGFTFSNYWMNWVRQAPGKGLEWVAEIRLYSNNYATHYAESVKGRFTISRDDSKSTLYLQMNNLKTEDTGVYYCTRYYGNYGGYFDVWGRGTLVTVSSASTKGPSVFPLAPSSKSTSGGTAALGCLVKDYFPEPVTVSWNSGALTSGVHTFPAVLQSSGLYSLSSVVTVPSSSLGTQTYICNVNHKPSDTKVDKKVEPKSCDKTHTCPPCPAPPVAGPSVFLFPPKPKDTLMISRTPEVTCVVVDVKHEDPEVKFNWYVDGVEVHNAKTKPREEEYNSTYRVVSVLTVLHQDWLNGKEYKCKVSNKALPAPIEKTISKAKGQPREPQVYTLPPSREEMTKNQVSLTCDVSGFYPSDIAVEWESDGQPENNYKTTPPVLDSDGSFFLYSKLTVDKSRWEQGDVFSCSVMHEALHNHYTQKSLSLSPGK

SEQ ID NO: 26885 - protein, 122 aa, Artificial Sequence; identical to SEQ ID NO: 2872
  Description of Artificial Sequence: Synthetic polypeptide
  VH of XENP024128

SEQ ID NO: 26886 - protein, 5 aa, Artificial Sequence
  Description of Artificial Sequence: Synthetic peptide
  XENP024128 vhCDR1
NYWMN

SEQ ID NO: 26887 - protein, 19 aa, Artificial Sequence
  Description of Artificial Sequence: Synthetic peptide
  XENP024128 vhCDR2
EIRLYSNNYATHYAESVKG

SEQ ID NO: 26888 - protein, 11 aa, Artificial Sequence
  Description of Artificial Sequence: Synthetic peptide
  XENP024128 vhCDR3
YYGNYGGYFDV

SEQ ID NO: 26889 - protein, 722 aa, Artificial Sequence
  Description of Artificial Sequence: Synthetic polypeptide
  XENP024128 1G6_L1.194_H1.279_Fab-1G6_L1.194_H1.279_Fab_[anti-ICOS] _H0L0_scFv Fab-scFv-Fc Heavy Chain
EVQLVESGGGLVKPGGSLRLSCVASGFTFSNYWMNWVRQAPGKGLEWVAEIRLYSNNYATHYAESVKGRFTISRDDSKSTLYLQMNNLKTEDTGVYYCTRYYGNYGGYFDVWGRGTLVTVSSASTKGPSVFPLAPSSKSTSGGTAALGCLVKDYFPEPVTVSWNSGALTSGVHTFPAVLQSSGLYSLSSVVTVPSSSLGTQTYICNVNHKPSNTKVDKKVEPKSCGKPGSGKPGSQVQLVQSGAEVKKPGASVKVSCKASGYTFTGYYMHWVRQAPGQGLEWMGWINPHSGGTNYAQKFQGRVTMTRDTSISTAYMELSRLRSDDTAVYYCARTYYYDSSGYYHDAFDIWGQGTMVTVSSGKPGSGKPGSGKPGSGKPGSDIQMTQSPSSVSASVGDRVTITCRASQGISRLLAWYQQKPGKAPKLLIYVASSLQSGVPSRFSGSGSGTDFTLTISSLQPEDFATYYCQQANSFPWTFGQGTKVEIKGGGGSGGGGSKTHTCPPCPAPPVAGPSVFLFPPKPKDTLMISRTPEVTCVVVDVKHEDPEVKFNWYVDGVEVHNAKTKPREEQYNSTYRVVSVLTVLHQDWLNGKEYKCKVSNKALPAPIEKTISKAKGQPREPQVYTLPPSREQMTKNQVKLTCLVKGFYPSDIAVEWESNGQPENNYKTTPPVLDSDGSFFLYSKLTVDKSRWQQGNVFSCSVMHEALHNHYTQKSLSLSPGK

SEQ ID NO: 26890 - protein, 122 aa, Artificial Sequence; identical to SEQ ID NO: 2872
  Description of Artificial Sequence: Synthetic polypeptide
  VH of XENP024128

SEQ ID NO: 26891 - protein, 113 aa, Artificial Sequence; identical to SEQ ID NO: 26849
  Description of Artificial Sequence: Synthetic polypeptide
  Fc chain of XENP024128

SEQ ID NO: 26892 - protein, 125 aa, Artificial Sequence; identical to SEQ ID NO: 26293
  Description of Artificial Sequence: Synthetic polypeptide
  VL of XENP024128

SEQ ID NO: 26893 - protein, 225 aa, Artificial Sequence; identical to SEQ ID NO: 26851
  Description of Artificial Sequence: Synthetic polypeptide
  Fc chain of XENP024128

SEQ ID NO: 26894 - protein, 5 aa, Artificial Sequence
  Description of Artificial Sequence: Synthetic peptide
  XENP024128 vhCDR1
NYWMN

SEQ ID NO: 26895 - protein, 19 aa, Artificial Sequence
  Description of Artificial Sequence: Synthetic peptide
  XENP024128 vhCDR2
EIRLYSNNYATHYAESVKG

SEQ ID NO: 26896 - protein, 11 aa, Artificial Sequence
  Description of Artificial Sequence: Synthetic peptide
  XENP024128 vhCDR3
YYGNYGGYFDV

SEQ ID NO: 26897 - protein, 5 aa, Artificial Sequence
  Description of Artificial Sequence: Synthetic peptide
  XENP024128 vlCDR1
GYYMH

SEQ ID NO: 26898 - protein, 17 aa, Artificial Sequence
  Description of Artificial Sequence: Synthetic peptide
  XENP024128 vlCDR2
WINPHSGGTNYAQKFQG

SEQ ID NO: 26899 - protein, 16 aa, Artificial Sequence
  Description of Artificial Sequence: Synthetic peptide
  XENP024128 vlCDR3
TYYYDSSGYYHDAFDI

SEQ ID NO: 26900 - protein, 214 aa, Artificial Sequence; identical to SEQ ID NO: 21486
  Description of Artificial Sequence: Synthetic polypeptide
  XENP024128 1G6_L1.194_H1.279_Fab-1G6_L1.194_H1.279_Fab_[anti-ICOS] _H0L0_scFv Light Chain

SEQ ID NO: 26901 - protein, 107 aa, Artificial Sequence; identical to SEQ ID NO: 2871
  Description of Artificial Sequence: Synthetic polypeptide
  VL of XENP024128

SEQ ID NO: 26902 - protein, 11 aa, Artificial Sequence
  Description of Artificial Sequence: Synthetic peptide
  XENP024128 vlCDR1
RASQSVGNDVA

SEQ ID NO: 26903 - protein, 7 aa, Artificial Sequence
  Description of Artificial Sequence: Synthetic peptide
  XENP024128 vlCDR2
YASHRYT

SEQ ID NO: 26904 - protein, 9 aa, Artificial Sequence
  Description of Artificial Sequence: Synthetic peptide
  XENP024128 vlCDR3
QQDFSSPRT

SEQ ID NO: 26905 - protein, 722 aa, Artificial Sequence
  Description of Artificial Sequence: Synthetic polypeptide
  XENP024123 1G6_H1.279_L1.194_Fab_(G4S)2_[anti-ICOS]_H0L0_scFv20 _Fc_IgG1 Heavy Chain
EVQLVESGGGLVKPGGSLRLSCVASGFTFSNYWMNWVRQAPGKGLEWVAEIRLYSNNYATHYAESVKGRFTISRDDSKSTLYLQMNNLKTEDTGVYYCTRYYGNYGGYFDVWGRGTLVTVSSASTKGPSVFPLAPSSKSTSGGTAALGCLVKDYFPEPVTVSWNSGALTSGVHTFPAVLQSSGLYSLSSVVTVPSSSLGTQTYICNVNHKPSNTKVDKKVEPKSCGGGGSGGGGSQVQLVQSGAEVKKPGASVKVSCKASGYTFTGYYMHWVRQAPGQGLEWMGWINPHSGGTNYAQKFQGRVTMTRDTSISTAYMELSRLRSDDTAVYYCARTYYYDSSGYYHDAFDIWGQGTMVTVSSGGGGSGGGGSGGGGSGGGGSDIQMTQSPSSVSASVGDRVTITCRASQGISRLLAWYQQKPGKAPKLLIYVASSLQSGVPSRFSGSGSGTDFTLTISSLQPEDFATYYCQQANSFPWTFGQGTKVEIKGGGGSGGGGSKTHTCPPCPAPPVAGPSVFLFPPKPKDTLMISRTPEVTCVVVDVKHEDPEVKFNWYVDGVEVHNAKTKPREEQYNSTYRVVSVLTVLHQDWLNGKEYKCKVSNKALPAPIEKTISKAKGQPREPQVYTLPPSREEMTKNQVSLTCLVKGFYPSDIAVEWESNGQPENNYKTTPPVLDSDGSFFLYSKLTVDKSRWQQGNVFSCSVMHEALHNHYTQKSLSLSPGK

SEQ ID NO: 26906 - protein, 122 aa, Artificial Sequence; identical to SEQ ID NO: 2872
  Description of Artificial Sequence: Synthetic polypeptide
  VH of XENP024123

SEQ ID NO: 26907 - protein, 113 aa, Artificial Sequence
  Description of Artificial Sequence: Synthetic polypeptide
  Fc chain of XENP024123
ASTKGPSVFPLAPSSKSTSGGTAALGCLVKDYFPEPVTVSWNSGALTSGVHTFPAVLQSSGLYSLSSVVTVPSSSLGTQTYICNVNHKPSNTKVDKKVEPKSCGGGGSGGGGS

SEQ ID NO: 26908 - protein, 125 aa, Artificial Sequence; identical to SEQ ID NO: 26293
  Description of Artificial Sequence: Synthetic polypeptide
  VL of XENP024123

SEQ ID NO: 26909 - protein, 225 aa, Artificial Sequence
  Description of Artificial Sequence: Synthetic polypeptide
  Fc chain of XENP024123
KTHTCPPCPAPPVAGPSVFLFPPKPKDTLMISRTPEVTCVVVDVKHEDPEVKFNWYVDGVEVHNAKTKPREEQYNSTYRVVSVLTVLHQDWLNGKEYKCKVSNKALPAPIEKTISKAKGQPREPQVYTLPPSREEMTKNQVSLTCLVKGFYPSDIAVEWESNGQPENNYKTTPPVLDSDGSFFLYSKLTVDKSRWQQGNVFSCSVMHEALHNHYTQKSLSLSPGK

SEQ ID NO: 26910 - protein, 5 aa, Artificial Sequence
  Description of Artificial Sequence: Synthetic peptide
  XENP024123 vhCDR1
NYWMN

SEQ ID NO: 26911 - protein, 19 aa, Artificial Sequence
  Description of Artificial Sequence: Synthetic peptide
  XENP024123 vhCDR2
EIRLYSNNYATHYAESVKG

SEQ ID NO: 26912 - protein, 11 aa, Artificial Sequence
  Description of Artificial Sequence: Synthetic peptide
  XENP024123 vhCDR3
YYGNYGGYFDV

SEQ ID NO: 26913 - protein, 5 aa, Artificial Sequence
  Description of Artificial Sequence: Synthetic peptide
  XENP024123 vlCDR1
GYYMH

SEQ ID NO: 26914 - protein, 17 aa, Artificial Sequence
  Description of Artificial Sequence: Synthetic peptide
  XENP024123 vlCDR2
WINPHSGGTNYAQKFQG

SEQ ID NO: 26915 - protein, 16 aa, Artificial Sequence
  Description of Artificial Sequence: Synthetic peptide
  XENP024123 vlCDR3
TYYYDSSGYYHDAFDI

SEQ ID NO: 26916 - protein, 214 aa, Artificial Sequence; identical to SEQ ID NO: 21486
  Description of Artificial Sequence: Synthetic polypeptide
  XENP024123 1G6_H1.279_L1.194_Fab_(G4S)2_[anti-ICOS]_H0L0 _scFv20_Fc_IgG1 Light Chain

SEQ ID NO: 26917 - protein, 107 aa, Artificial Sequence; identical to SEQ ID NO: 2871
  Description of Artificial Sequence: Synthetic polypeptide
  VL of XENP024123

SEQ ID NO: 26918 - protein, 11 aa, Artificial Sequence
  Description of Artificial Sequence: Synthetic peptide
  XENP024123 vlCDR1
RASQSVGNDVA

SEQ ID NO: 26919 - protein, 7 aa, Artificial Sequence
  Description of Artificial Sequence: Synthetic peptide
  XENP024123 vlCDR2
YASHRYT

SEQ ID NO: 26920 - protein, 9 aa, Artificial Sequence
  Description of Artificial Sequence: Synthetic peptide
  XENP024123 vlCDR3
QQDFSSPRT

SEQ ID NO: 26921 - protein, 727 aa, Artificial Sequence
  Description of Artificial Sequence: Synthetic polypeptide
  XENP024125 LOPD180[PD-1]_H1L1_Fab_(G4S)2_[anti-ICOS]_H0L0 _scFv20_Fc_IgG1 Heavy Chain
QVQLQESGPGLVKPSQTLSLTCTVSGGSISSGAYYWSWIRQHPGKGLEWIGYIYYNGNTYYNPSLRSRVTISVDTSKNQFSLKLSSVTAADTAVYYCVRASDYVWGGYHYFDAFDLWGRGTLVTVSSASTKGPSVFPLAPSSKSTSGGTAALGCLVKDYFPEPVTVSWNSGALTSGVHTFPAVLQSSGLYSLSSVVTVPSSSLGTQTYICNVNHKPSNTKVDKKVEPKSCGGGGSGGGGSQVQLVQSGAEVKKPGASVKVSCKASGYTFTGYYMHWVRQAPGQGLEWMGWINPHSGGTNYAQKFQGRVTMTRDTSISTAYMELSRLRSDDTAVYYCARTYYYDSSGYYHDAFDIWGQGTMVTVSSGGGGSGGGGSGGGGSGGGGSDIQMTQSPSSVSASVGDRVTITCRASQGISRLLAWYQQKPGKAPKLLIYVASSLQSGVPSRFSGSGSGTDFTLTISSLQPEDFATYYCQQANSFPWTFGQGTKVEIKGGGGSGGGGSKTHTCPPCPAPPVAGPSVFLFPPKPKDTLMISRTPEVTCVVVDVKHEDPEVKFNWYVDGVEVHNAKTKPREEQYNSTYRVVSVLTVLHQDWLNGKEYKCKVSNKALPAPIEKTISKAKGQPREPQVYTLPPSREEMTKNQVSLTCLVKGFYPSDIAVEWESNGQPENNYKTTPPVLDSDGSFFLYSKLTVDKSRWQQGNVFSCSVMHEALHNHYTQKSLSLSPGK

SEQ ID NO: 26922 - protein, 127 aa, Artificial Sequence; identical to SEQ ID NO: 26823
  Description of Artificial Sequence: Synthetic polypeptide
  VH of XENP024125

SEQ ID NO: 26923 - protein, 113 aa, Artificial Sequence; identical to SEQ ID NO: 26907
  Description of Artificial Sequence: Synthetic polypeptide
  Fc chain of XENP024125

SEQ ID NO: 26924 - protein, 125 aa, Artificial Sequence; identical to SEQ ID NO: 26293
  Description of Artificial Sequence: Synthetic polypeptide
  VL of XENP024125

SEQ ID NO: 26925 - protein, 225 aa, Artificial Sequence; identical to SEQ ID NO: 26909
  Description of Artificial Sequence: Synthetic polypeptide
  Fc chain of XENP024125

SEQ ID NO: 26926 - protein, 7 aa, Artificial Sequence
  Description of Artificial Sequence: Synthetic peptide
  XENP024125 vhCDR1
SGAYYWS

SEQ ID NO: 26927 - protein, 16 aa, Artificial Sequence
  Description of Artificial Sequence: Synthetic peptide
  XENP024125 vhCDR2
YIYYNGNTYYNPSLRS

SEQ ID NO: 26928 - protein, 17 aa, Artificial Sequence
  Description of Artificial Sequence: Synthetic peptide
  XENP024125 vhCDR3
ASDYVWGGYHYFDAFDL

SEQ ID NO: 26929 - protein, 5 aa, Artificial Sequence
  Description of Artificial Sequence: Synthetic peptide
  XENP024125 vlCDR1
GYYMH

SEQ ID NO: 26930 - protein, 17 aa, Artificial Sequence
  Description of Artificial Sequence: Synthetic peptide
  XENP024125 vlCDR2
WINPHSGGTNYAQKFQG

SEQ ID NO: 26931 - protein, 16 aa, Artificial Sequence
  Description of Artificial Sequence: Synthetic peptide
  XENP024125 vlCDR3
TYYYDSSGYYHDAFDI

SEQ ID NO: 26932 - protein, 216 aa, Artificial Sequence; identical to SEQ ID NO: 26837
  Description of Artificial Sequence: Synthetic polypeptide
  XENP024125 LOPD180[PD-1]_H1L1_Fab_(G4S)2_[anti-ICOS]_H0L0 _scFv20_Fc_IgG1 Light Chain

SEQ ID NO: 26933 - protein, 110 aa, Artificial Sequence; identical to SEQ ID NO: 26838
  Description of Artificial Sequence: Synthetic polypeptide
  VL of XENP024125

SEQ ID NO: 26934 - protein, 13 aa, Artificial Sequence
  Description of Artificial Sequence: Synthetic peptide
  XENP024125 vlCDR1
SGSNSNIGSNSVN

SEQ ID NO: 26935 - protein, 7 aa, Artificial Sequence
  Description of Artificial Sequence: Synthetic peptide
  XENP024125 vlCDR2
GNNQRPS

SEQ ID NO: 26936 - protein, 11 aa, Artificial Sequence
  Description of Artificial Sequence: Synthetic peptide
  XENP024125 vlCDR3
AAWDDSLNGPV

SEQ ID NO: 26937 - protein, 451 aa, Artificial Sequence; identical to SEQ ID NO: 26884
  Description of Artificial Sequence: Synthetic polypeptide
  XENP024134 1G6_H1.279_L1.194_Fab-[anti-ICOS]_H0L0 _Fab-IgG1 Heavy Chain 1

SEQ ID NO: 26938 - protein, 122 aa, Artificial Sequence; identical to SEQ ID NO: 2872
  Description of Artificial Sequence: Synthetic polypeptide
  VH of XENP024134

SEQ ID NO: 26939 - protein, 5 aa, Artificial Sequence
  Description of Artificial Sequence: Synthetic peptide
  XENP024134 vhCDR1
NYWMN

SEQ ID NO: 26940 - protein, 19 aa, Artificial Sequence
  Description of Artificial Sequence: Synthetic peptide
  XENP024134 vhCDR2
EIRLYSNNYATHYAESVKG

SEQ ID NO: 26941 - protein, 11 aa, Artificial Sequence
  Description of Artificial Sequence: Synthetic peptide
  XENP024134 vhCDR3
YYGNYGGYFDV

SEQ ID NO: 26942 - protein, 454 aa, Artificial Sequence
  Description of Artificial Sequence: Synthetic polypeptide
  XENP024134 1G6_H1.279_L1.194_Fab-[anti-ICOS]_H0L0 _Fab-IgG1 Heavy Chain 2
QVQLVQSGAEVKKPGASVKVSCKASGYTFTGYYMHWVRQAPGQGLEWMGWINPHSGGTNYAQKFQGRVTMTRDTSISTAYMELSRLRSDDTAVYYCARTYYYDSSGYYHDAFDIWGQGTMVTVSSASTKGPSVFPLAPSSKSTSGGTAALGCLVKDYFPEPVTVSWNSGALTSGVHTFPAVLQSSGLYSLSSVVTVPSSSLGTKTYTCNVNHKPSNTKVDKKVERKSCDKTHTCPRCPAPPVAGPSVFLFPPKPKDTLMISRTPEVTCVVVDVKHEDPEVKFKWYVDGVEVHNAKTKPREEQYNSTYRVVSVLTVLHQDWLNGKEYKCKVSNKALPAPIEKTISKAKGQPREPQVYTLPPSREQMTKNQVKLTCLVKGFYPSDIAVEWESNGQPENNYKTTPPVLDSDGSFFLYSKLTVDKSRWQQGNVFSCSVMHEALHNHYTQKSLSLSPGK

SEQ ID NO: 26943 - protein, 125 aa, Artificial Sequence; identical to SEQ ID NO: 26293
  Description of Artificial Sequence: Synthetic polypeptide
  VH of XENP024134

SEQ ID NO: 26944 - protein, 5 aa, Artificial Sequence
  Description of Artificial Sequence: Synthetic peptide
  XENP024134 vhCDR1
GYYMH

SEQ ID NO: 26945 - protein, 17 aa, Artificial Sequence
  Description of Artificial Sequence: Synthetic peptide
  XENP024134 vhCDR2
WINPHSGGTNYAQKFQG

SEQ ID NO: 26946 - protein, 16 aa, Artificial Sequence
  Description of Artificial Sequence: Synthetic peptide
  XENP024134 vhCDR3
TYYYDSSGYYHDAFDI

SEQ ID NO: 26947 - protein, 214 aa, Artificial Sequence; identical to SEQ ID NO: 21486
  Description of Artificial Sequence: Synthetic polypeptide
  XENP024134 1G6_H1.279_L1.194_Fab-[anti-ICOS]_H0L0 _Fab-IgG1 Light Chain 1

SEQ ID NO: 26948 - protein, 107 aa, Artificial Sequence; identical to SEQ ID NO: 2871
  Description of Artificial Sequence: Synthetic polypeptide
  VL of XENP024134

SEQ ID NO: 26949 - protein, 11 aa, Artificial Sequence
  Description of Artificial Sequence: Synthetic peptide
  XENP024134 vlCDR1
RASQSVGNDVA

SEQ ID NO: 26950 - protein, 7 aa, Artificial Sequence
  Description of Artificial Sequence: Synthetic peptide
  XENP024134 vlCDR2
YASHRYT

SEQ ID NO: 26951 - protein, 9 aa, Artificial Sequence
  Description of Artificial Sequence: Synthetic peptide
  XENP024134 vlCDR3
QQDFSSPRT

SEQ ID NO: 26952 - protein, 214 aa, Artificial Sequence; identical to SEQ ID NO: 26297
  Description of Artificial Sequence: Synthetic polypeptide
  XENP024134 1G6_H1.279_L1.194_Fab-[anti-ICOS]_H0L0 _Fab-IgG1 Light Chain 2

SEQ ID NO: 26953 - protein, 107 aa, Artificial Sequence; identical to SEQ ID NO: 26298
  Description of Artificial Sequence: Synthetic polypeptide
  VL of XENP024134

SEQ ID NO: 26954 - protein, 11 aa, Artificial Sequence
  Description of Artificial Sequence: Synthetic peptide
  XENP024134 vlCDR1
RASQGISRLLA

SEQ ID NO: 26955 - protein, 7 aa, Artificial Sequence
  Description of Artificial Sequence: Synthetic peptide
  XENP024134 vlCDR2
VASSLQS

SEQ ID NO: 26956 - protein, 9 aa, Artificial Sequence
  Description of Artificial Sequence: Synthetic peptide
  XENP024134 vlCDR3
QQANSFPWT

SEQ ID NO: 26957 - protein, 589 aa, Artificial Sequence
  Description of Artificial Sequence: Synthetic polypeptide
  XENP024122 1G6_H1.279_L1.194_[anti-ICOS]_H0L0_IgG1 Heavy Chain
EVQLVESGGGLVKPGGSLRLSCVASGFTFSNYWMNWVRQAPGKGLEWVAEIRLYSNNYATHYAESVKGRFTISRDDSKSTLYLQMNNLKTEDTGVYYCTRYYGNYGGYFDVWGRGTLVTVSSASTKGPSVFPLAPQVQLVQSGAEVKKPGASVKVSCKASGYTFTGYYMHWVRQAPGQGLEWMGWINPHSGGTNYAQKFQGRVTMTRDTSISTAYMELSRLRSDDTAVYYCARTYYYDSSGYYHDAFDIWGQGTMVTVSSASTKGPSVFPLAPSSKSTSGGTAALGCLVKDYFPEPVTVSWNSGALTSGVHTFPAVLQSSGLYSLSSVVTVPSSSLGTQTYICNVNHKPSNTKVDKKVEPKSCDKTHTCPPCPAPPVAGPSVFLFPPKPKDTLMISRTPEVTCVVVDVKHEDPEVKFNWYVDGVEVHNAKTKPREEQYNSTYRVVSVLTVLHQDWLNGKEYKCKVSNKALPAPIEKTISKAKGQPREPQVYTLPPSREEMTKNQVSLTCLVKGFYPSDIAVEWESNGQPENNYKTTPPVLDSDGSFFLYSKLTVDKSRWQQGNVFSCSVMHEALHNHYTQKSLSLSPGK

SEQ ID NO: 26958 - protein, 122 aa, Artificial Sequence; identical to SEQ ID NO: 2872
  Description of Artificial Sequence: Synthetic polypeptide
  VH of XENP024122

SEQ ID NO: 26959 - protein, 125 aa, Artificial Sequence; identical to SEQ ID NO: 26293
  Description of Artificial Sequence: Synthetic polypeptide
  VL of XENP024122

SEQ ID NO: 26960 - protein, 329 aa, Artificial Sequence
  Description of Artificial Sequence: Synthetic polypeptide
  Fc chain of XENP024122
ASTKGPSVFPLAPSSKSTSGGTAALGCLVKDYFPEPVTVSWNSGALTSGVHTFPAVLQSSGLYSLSSVVTVPSSSLGTQTYICNVNHKPSNTKVDKKVEPKSCDKTHTCPPCPAPPVAGPSVFLFPPKPKDTLMISRTPEVTCVVVDVKHEDPEVKFNWYVDGVEVHNAKTKPREEQYNSTYRVVSVLTVLHQDWLNGKEYKCKVSNKALPAPIEKTISKAKGQPREPQVYTLPPSREEMTKNQVSLTCLVKGFYPSDIAVEWESNGQPENNYKTTPPVLDSDGSFFLYSKLTVDKSRWQQGNVFSCSVMHEALHNHYTQKSLSLSPGK

SEQ ID NO: 26961 - protein, 5 aa, Artificial Sequence
  Description of Artificial Sequence: Synthetic peptide
  XENP024122 vhCDR1
NYWMN

SEQ ID NO: 26962 - protein, 19 aa, Artificial Sequence
  Description of Artificial Sequence: Synthetic peptide
  XENP024122 vhCDR2
EIRLYSNNYATHYAESVKG

SEQ ID NO: 26963 - protein, 11 aa, Artificial Sequence
  Description of Artificial Sequence: Synthetic peptide
  XENP024122 vhCDR3
YYGNYGGYFDV

SEQ ID NO: 26964 - protein, 5 aa, Artificial Sequence
  Description of Artificial Sequence: Synthetic peptide
  XENP024122 vlCDR1
GYYMH

SEQ ID NO: 26965 - protein, 17 aa, Artificial Sequence
  Description of Artificial Sequence: Synthetic peptide
  XENP024122 vlCDR2
WINPHSGGTNYAQKFQG

SEQ ID NO: 26966 - protein, 16 aa, Artificial Sequence
  Description of Artificial Sequence: Synthetic peptide
  XENP024122 vlCDR3
TYYYDSSGYYHDAFDI

SEQ ID NO: 26967 - protein, 334 aa, Artificial Sequence
  Description of Artificial Sequence: Synthetic polypeptide
  XENP024122 1G6_H1.279_L1.194_[anti-ICOS]_H0L0_IgG1 Light Chain
EIVLTQSPATLSASPGERVTLTCRASQSVGNDVAWYQQKPGQAPRLLINYASHRYTGVPDRFTGSGYGTEFTLTISSVQSEDFGVYYCQQDFSSPRTFGGGTKVEIKRTVAAPSVFIFPPDIQMTQSPSSVSASVGDRVTITCRASQGISRLLAWYQQKPGKAPKLLIYVASSLQSGVPSRFSGSGSGTDFTLTISSLQPEDFATYYCQQANSFPWTFGQGTKVEIKRTVAAPSVFIFPPSDEQLKSGTASVVCLLNNFYPREAKVQWKVDNALQSGNSQESVTEQDSKDSTYSLSSTLTLSKADYEKHKVYACEVTHQGLSSPVTKSFNRGEC

SEQ ID NO: 26968 - protein, 107 aa, Artificial Sequence; identical to SEQ ID NO: 2871
  Description of Artificial Sequence: Synthetic polypeptide
  VH of XENP024122

SEQ ID NO: 26969 - protein, 107 aa, Artificial Sequence; identical to SEQ ID NO: 26298
  Description of Artificial Sequence: Synthetic polypeptide
  VL of XENP024122

SEQ ID NO: 26970 - protein, 107 aa, Artificial Sequence [sequence omitted]

SEQ ID NO: 26971 - protein, 11 aa, Artificial Sequence
  Description of Artificial Sequence: Synthetic peptide
  XENP024122 vhCDR1
RASQSVGNDVA

SEQ ID NO: 26972 - protein, 7 aa, Artificial Sequence
  Description of Artificial Sequence: Synthetic peptide
  XENP024122 vhCDR2
YASHRYT

SEQ ID NO: 26973 - protein, 9 aa, Artificial Sequence
  Description of Artificial Sequence: Synthetic peptide
  XENP024122 vhCDR3
QQDFSSPRT

SEQ ID NO: 26974 - protein, 11 aa, Artificial Sequence
  Description of Artificial Sequence: Synthetic peptide
  XENP024122 vlCDR1
RASQGISRLLA

SEQ ID NO: 26975 - protein, 7 aa, Artificial Sequence
  Description of Artificial Sequence: Synthetic peptide
  XENP024122 vlCDR2
VASSLQS

SEQ ID NO: 26976 - protein, 9 aa, Artificial Sequence
  Description of Artificial Sequence: Synthetic peptide
  XENP024122 vlCDR3
QQANSFPWT

SEQ ID NO: 26977 - protein, 502 aa, Artificial Sequence
  Description of Artificial Sequence: Synthetic polypeptide
  XENP024132 1G6_L1.194_1G6_H1.279_DART-[anti-ICOS]_H0L0 _Fab-Fc_IgG1 Heavy Chain
EIVLTQSPATLSASPGERVTLTCRASQSVGNDVAWYQQKPGQAPRLLINYASHRYTGVPDRFTGSGYGTEFTLTISSVQSEDFGVYYCQQDFSSPRTFGGGTKVEIKGGGSGGGGEVQLVESGGGLVKPGGSLRLSCVASGFTFSNYWMNWVRQAPGKGLEWVAEIRLYSNNYATHYAESVKGRFTISRDDSKSTLYLQMNNLKTEDTGVYYCTRYYGNYGGYFDVWGRGTLVTVSSGGCGGGEVAACEKEVAALEKEVAALEKEVAALEKEPKSSDKTHTCPPCPAPPVAGPSVFLFPPKPKDTLMISRTPEVTCVVVDVKHEDPEVKFNWYVDGVEVHNAKTKPREEEYNSTYRVVSVLTVLHQDWLNGKEYKCKVSNKALPAPIEKTISKAKGQPREPQVYTLPPSREEMTKNQVSLTCDVSGFYPSDIAVEWESDGQPENNYKTTPPVLDSDGSFFLYSKLTVDKSRWEQGDVFSCSVMHEALHNHYTQKSLSLSPGK

SEQ ID NO: 26978 - protein, 107 aa, Artificial Sequence; identical to SEQ ID NO: 2871
  Description of Artificial Sequence: Synthetic polypeptide
  VH of XENP024132

SEQ ID NO: 26979 - protein, 122 aa, Artificial Sequence; identical to SEQ ID NO: 2872
  Description of Artificial Sequence: Synthetic polypeptide
  VL of XENP024132

SEQ ID NO: 26980 - protein, 265 aa, Artificial Sequence
  Description of Artificial Sequence: Synthetic polypeptide
  Fc chain of XENP024132
GGCGGGEVAACEKEVAALEKEVAALEKEVAALEKEPKSSDKTHTCPPCPAPPVAGPSVFLFPPKPKDTLMISRTPEVTCVVVDVKHEDPEVKFNWYVDGVEVHNAKTKPREEEYNSTYRVVSVLTVLHQDWLNGKEYKCKVSNKALPAPIEKTISKAKGQPREPQVYTLPPSREEMTKNQVSLTCDVSGFYPSDIAVEWESDGQPENNYKTTPPVLDSDGSFFLYSKLTVDKSRWEQGDVFSCSVMHEALHNHYTQKSLSLSPGK

SEQ ID NO: 26981 - protein, 11 aa, Artificial Sequence
  Description of Artificial Sequence: Synthetic peptide
  XENP024132 vhCDR1
RASQSVGNDVA

SEQ ID NO: 26982 - protein, 7 aa, Artificial Sequence
  Description of Artificial Sequence: Synthetic peptide
  XENP024132 vhCDR2
YASHRYT

SEQ ID NO: 26983 - protein, 9 aa, Artificial Sequence
  Description of Artificial Sequence: Synthetic peptide
  XENP024132 vhCDR3
QQDFSSPRT

SEQ ID NO: 26984 - protein, 5 aa, Artificial Sequence
  Description of Artificial Sequence: Synthetic peptide
  XENP024132 vlCDR1
NYWMN

SEQ ID NO: 26985 - protein, 19 aa, Artificial Sequence
  Description of Artificial Sequence: Synthetic peptide
  XENP024132 vlCDR2
EIRLYSNNYATHYAESVKG

SEQ ID NO: 26986 - protein, 11 aa, Artificial Sequence
  Description of Artificial Sequence: Synthetic peptide
  XENP024132 vlCDR3
YYGNYGGYFDV

SEQ ID NO: 26987 - protein, 454 aa, Artificial Sequence; identical to SEQ ID NO: 26942
  Description of Artificial Sequence: Synthetic polypeptide
  XENP024132 1G6_L1.194_1G6_H1.279_DART-[anti-ICOS]_H0L0 _Fab-Fc_IgG1 Heavy Chain

SEQ ID NO: 26988 - protein, 125 aa, Artificial Sequence; identical to SEQ ID NO: 26293
  Description of Artificial Sequence: Synthetic polypeptide
  VH of XENP024132

SEQ ID NO: 26989 - protein, 5 aa, Artificial Sequence
  Description of Artificial Sequence: Synthetic peptide
  XENP024132 vhCDR1
GYYMH

SEQ ID NO: 26990 - protein, 17 aa, Artificial Sequence
  Description of Artificial Sequence: Synthetic peptide
  XENP024132 vhCDR2
WINPHSGGTNYAQKFQG

SEQ ID NO: 26991 - protein, 16 aa, Artificial Sequence
  Description of Artificial Sequence: Synthetic peptide
  XENP024132 vhCDR3
TYYYDSSGYYHDAFDI

SEQ ID NO: 26992 - protein, 281 aa, Artificial Sequence
  Description of Artificial Sequence: Synthetic polypeptide
  XENP024132 1G6_L1.194_1G6_H1.279_DART-[anti-ICOS]_H0L0 _Fab-Fc_IgG1 Light Chain 1
EIVLTQSPATLSASPGERVTLTCRASQSVGNDVAWYQQKPGQAPRLLINYASHRYTGVPDRFTGSGYGTEFTLTISSVQSEDFGVYYCQQDFSSPRTFGGGTKVEIKGGGSGGGGEVQLVESGGGLVKPGGSLRLSCVASGFLRLSCVASGFTFSNYWMNWVRQAPGKGLEWVAEIRLYSNNYATHYAESVKGRFTISRDDSKSTLYLQMNNLKTEDTGVYYCTRYYGNYGGYFDVWGRGTLVTVSSGGCGGGKVAACKEKVAALKEKVAALKEKVAALKE

SEQ ID NO: 26993 - protein, 107 aa, Artificial Sequence; identical to SEQ ID NO: 2871
  Description of Artificial Sequence: Synthetic polypeptide
  VH of XENP024132

SEQ ID NO: 26994 - protein, 132 aa, Artificial Sequence
  Description of Artificial Sequence: Synthetic polypeptide
  VL of XENP024132
EVQLVESGGGLVKPGGSLRLSCVASGFLRLSCVASGFTFSNYWMNWVRQAPGKGLEWVAEIRLYSNNYATHYAESVKGRFTISRDDSKSTLYLQMNNLKTEDTGVYYCTRYYGNYGGYFDVWGRGTLVTVSS

SEQ ID NO: 26995 - protein, 34 aa, Artificial Sequence
  Description of Artificial Sequence: Synthetic polypeptide
  Fc chain of XENP024132
GGCGGGKVAACKEKVAALKEKVAALKEKVAALKE

SEQ ID NO: 26996 - protein, 11 aa, Artificial Sequence
  Description of Artificial Sequence: Synthetic peptide
  XENP024132 vhCDR1
RASQSVGNDVA

SEQ ID NO: 26997 - protein, 7 aa, Artificial Sequence
  Description of Artificial Sequence: Synthetic peptide
  XENP024132 vhCDR2
YASHRYT

SEQ ID NO: 26998 - protein, 9 aa, Artificial Sequence
  Description of Artificial Sequence: Synthetic peptide
  XENP024132 vhCDR3
QQDFSSPRT

SEQ ID NO: 26999 - protein, 15 aa, Artificial Sequence
  Description of Artificial Sequence: Synthetic peptide
  XENP024132 vlCDR1
SCVASGFTFSNYWMN

SEQ ID NO: 27000 - protein, 19 aa, Artificial Sequence
  Description of Artificial Sequence: Synthetic peptide
  XENP024132 vlCDR2
EIRLYSNNYATHYAESVKG

SEQ ID NO: 27001 - protein, 11 aa, Artificial Sequence
  Description of Artificial Sequence: Synthetic peptide
  XENP024132 vlCDR3
YYGNYGGYFDV

SEQ ID NO: 27002 - protein, 214 aa, Artificial Sequence; identical to SEQ ID NO: 26297
  Description of Artificial Sequence: Synthetic polypeptide
  XENP024132 1G6_L1.194_1G6_H1.279_DART-[anti-ICOS]_H0L0 _Fab-Fc_IgG1 Light Chain 2

SEQ ID NO: 27003 - protein, 107 aa, Artificial Sequence; identical to SEQ ID NO: 26298
  Description of Artificial Sequence: Synthetic polypeptide
  VL of XENP024132

SEQ ID NO: 27004 - protein, 11 aa, Artificial Sequence
  Description of Artificial Sequence: Synthetic peptide
  XENP024132 vlCDR1
RASQGISRLLA

SEQ ID NO: 27005 - protein, 7 aa, Artificial Sequence
  Description of Artificial Sequence: Synthetic peptide
  XENP024132 vlCDR2
VASSLQS

SEQ ID NO: 27006 - protein, 9 aa, Artificial Sequence
  Description of Artificial Sequence: Synthetic peptide
  XENP024132 vlCDR3
QQANSFPWT

SEQ ID NO: 27007 - protein, 503 aa, Artificial Sequence
  Description of Artificial Sequence: Synthetic polypeptide
  XENP024133 mAb7(1.2)[PD-1]_L1_mAb7(1.2)[PD-1]_H1 _DART-[anti-ICOS]_H0L0_Fab-Fc_IgG1 Heavy Chain 1
EIVLTQSPATLSLSPGERATLSCRASESVDNYGMSFMNWFQQKPGQPPKLLIHAASNQGSGVPSRFSGSGSGTDFTLTISSLEPEDFAVYFCQQSKEVPYTFGGGTKVEIKGGGSGGGGQVQLVQSGAEVKKPGASVKVSCKASGYSFTSYWMNWVRQAPGQGLEWIGVIHPSDSETWLDQKFKDRVTITVDKSTSTAYMELSSLRSEDTAVYYCAREHYGTSPFAYWGQGTLVTVSSGGCGGGEVAACEKEVAALEKEVAALEKEVAALEKEPKSSDKTHTCPPCPAPPVAGPSVFLFPPKPKDTLMISRTPEVTCVVVDVKHEDPEVKFNWYVDGVEVHNAKTKPREEEYNSTYRVVSVLTVLHQDWLNGKEYKCKVSNKALPAPIEKTISKAKGQPREPQVYTLPPSREEMTKNQVSLTCDVSGFYPSDIAVEWESDGQPENNYKTTPPVLDSDGSFFLYSKLTVDKSRWEQGDVFSCSVMHEALHNHYTQKSLSLSPGK

SEQ ID NO: 27008 - protein, 111 aa, Artificial Sequence
  Description of Artificial Sequence: Synthetic polypeptide
  VH of XENP024133
EIVLTQSPATLSLSPGERATLSCRASESVDNYGMSFMNWFQQKPGQPPKLLIHAASNQGSGVPSRFSGSGSGTDFTLTISSLEPEDFAVYFCQQSKEVPYTFGGGTKVEIK

SEQ ID NO: 27009 - protein, 119 aa, Artificial Sequence
  Description of Artificial Sequence: Synthetic polypeptide
  VL of XENP024133
QVQLVQSGAEVKKPGASVKVSCKASGYSFTSYWMNWVRQAPGQGLEWIGVIHPSDSETWLDQKFKDRVTITVDKSTSTAYMELSSLRSEDTAVYYCAREHYGTSPFAYWGQGTLVTVSS

SEQ ID NO: 27010 - protein, 265 aa, Artificial Sequence; identical to SEQ ID NO: 26980
  Description of Artificial Sequence: Synthetic polypeptide
  Fc chain of XENP024133

SEQ ID NO: 27011 - protein, 15 aa, Artificial Sequence
  Description of Artificial Sequence: Synthetic peptide
  XENP024133 vhCDR1
RASESVDNYGMSFMN

SEQ ID NO: 27012 - protein, 7 aa, Artificial Sequence
  Description of Artificial Sequence: Synthetic peptide
  XENP024133 vhCDR2
AASNQGS

SEQ ID NO: 27013 - protein, 9 aa, Artificial Sequence
  Description of Artificial Sequence: Synthetic peptide
  XENP024133 vhCDR3
QQSKEVPYT

SEQ ID NO: 27014 - protein, 5 aa, Artificial Sequence
  Description of Artificial Sequence: Synthetic peptide
  XENP024133 vlCDR1
SYWMN

SEQ ID NO: 27015 - protein, 17 aa, Artificial Sequence
  Description of Artificial Sequence: Synthetic peptide
  XENP024133 vlCDR2
VIHPSDSETWLDQKFKD

SEQ ID NO: 27016 - protein, 10 aa, Artificial Sequence
  Description of Artificial Sequence: Synthetic peptide
  XENP024133 vlCDR3
EHYGTSPFAY

SEQ ID NO: 27017 - protein, 454 aa, Artificial Sequence; identical to SEQ ID NO: 26942
  Description of Artificial Sequence: Synthetic polypeptide
  XENP024133 mAb7(1.2)[PD-1]_L1_mAb7(1.2)[PD-1]_H1 _DART-[anti-ICOS]_H0L0_Fab-Fc_IgG1 Heavy Chain 2

SEQ ID NO: 27018 - protein, 125 aa, Artificial Sequence; identical to SEQ ID NO: 26293
  Description of Artificial Sequence: Synthetic polypeptide
  VH of XENP024133

SEQ ID NO: 27019 - protein, 5 aa, Artificial Sequence
  Description of Artificial Sequence: Synthetic peptide
  XENP024133 vhCDR1
GYYMH

SEQ ID NO: 27020 - protein, 17 aa, Artificial Sequence
  Description of Artificial Sequence: Synthetic peptide
  XENP024133 vhCDR2
WINPHSGGTNYAQKFQG

SEQ ID NO: 27021 - protein, 16 aa, Artificial Sequence
  Description of Artificial Sequence: Synthetic peptide
  XENP024133 vhCDR3
TYYYDSSGYYHDAFDI

SEQ ID NO: 27022 - protein, 282 aa, Artificial Sequence
  Description of Artificial Sequence: Synthetic polypeptide
  XENP024133 mAb7(1.2)[PD-1]_L1_mAb7(1.2)[PD-1]_H1 _DART-[anti-ICOS]_H0L0_Fab-Fc_IgG1 Light Chain 1
EIVLTQSPATLSLSPGERATLSCRASESVDNYGMSFMNWFQQKPGQPPKLLIHAASNQGSGVPSRFSGSGSGTDFTLTISSLEPEDFAVYFCQQSKEVPYTFGGGTKVEIKGGGSGGGGQVQLVQSGAEVKKPGASVKVSCKAGASVKVSCKASGYSFTSYWMNWVRQAPGQGLEWIGVIHPSDSETWLDQKFKDRVTITVDKSTSTAYMELSSLRSEDTAVYYCAREHYGTSPFAYWGQGTLVTVSSGGCGGGKVAACKEKVAALKEKVAALKEKVAALKE

SEQ ID NO: 27023 - protein, 111 aa, Artificial Sequence; identical to SEQ ID NO: 27008
  Description of Artificial Sequence: Synthetic polypeptide
  VH of XENP024133

SEQ ID NO: 27024 - protein, 129 aa, Artificial Sequence
  Description of Artificial Sequence: Synthetic polypeptide
  VL of XENP024133
QVQLVQSGAEVKKPGASVKVSCKAGASVKVSCKASGYSFTSYWMNWVRQAPGQGLEWIGVIHPSDSETWLDQKFKDRVTITVDKSTSTAYMELSSLRSEDTAVYYCAREHYGTSPFAYWGQGTLVTVSS

SEQ ID NO: 27025 - protein, 34 aa, Artificial Sequence; identical to SEQ ID NO: 26995
  Description of Artificial Sequence: Synthetic polypeptide
  Fc chain of XENP024133

SEQ ID NO: 27026 - protein, 15 aa, Artificial Sequence
  Description of Artificial Sequence: Synthetic peptide
  XENP024133 vhCDR1
RASESVDNYGMSFMN

SEQ ID NO: 27027 - protein, 7 aa, Artificial Sequence
  Description of Artificial Sequence: Synthetic peptide
  XENP024133 vhCDR2
AASNQGS

SEQ ID NO: 27028 - protein, 9 aa, Artificial Sequence
  Description of Artificial Sequence: Synthetic peptide
  XENP024133 vhCDR3
QQSKEVPYT

SEQ ID NO: 27029 - protein, 5 aa, Artificial Sequence
  Description of Artificial Sequence: Synthetic peptide
  XENP024133 vlCDR1
SYWMN

SEQ ID NO: 27030 - protein, 17 aa, Artificial Sequence
  Description of Artificial Sequence: Synthetic peptide
  XENP024133 vlCDR2
VIHPSDSETWLDQKFKD

SEQ ID NO: 27031 - protein, 10 aa, Artificial Sequence
  Description of Artificial Sequence: Synthetic peptide
  XENP024133 vlCDR3
EHYGTSPFAY

SEQ ID NO: 27032 - protein, 214 aa, Artificial Sequence; identical to SEQ ID NO: 26297
  Description of Artificial Sequence: Synthetic polypeptide
  XENP024133 mAb7(1.2)[PD-1]_L1_mAb7(1.2)[PD-1]_H1 _DART-[anti-ICOS]_H0L0_Fab-Fc_IgG1 Light Chain 2

SEQ ID NO: 27033 - protein, 107 aa, Artificial Sequence; identical to SEQ ID NO: 26298
  Description of Artificial Sequence: Synthetic polypeptide
  VL of XENP024133

SEQ ID NO: 27034 - protein, 11 aa, Artificial Sequence
  Description of Artificial Sequence: Synthetic peptide
  XENP024133 vlCDR1
RASQGISRLLA

SEQ ID NO: 27035 - protein, 7 aa, Artificial Sequence
  Description of Artificial Sequence: Synthetic peptide
  XENP024133 vlCDR2
VASSLQS

SEQ ID NO: 27036 - protein, 9 aa, Artificial Sequence
  Description of Artificial Sequence: Synthetic peptide
  XENP024133 vlCDR3
QQANSFPWT

SEQ ID NO: 27037 - protein, 454 aa, Artificial Sequence; identical to SEQ ID NO: 26442
  Description of Artificial Sequence: Synthetic polypeptide
  XENP021749 [anti-ICOS]_H0L0_Fab-[anti-CTLA-4]_H3.23 _L0.129_scFv Fab-Fc Heavy Chain

SEQ ID NO: 27038 - protein, 125 aa, Artificial Sequence; identical to SEQ ID NO: 26293
  Description of Artificial Sequence: Synthetic polypeptide
  VH of XENP021749

SEQ ID NO: 27039 - protein, 5 aa, Artificial Sequence
  Description of Artificial Sequence: Synthetic peptide
  XENP021749 vhCDR1
GYYMH

SEQ ID NO: 27040 - protein, 17 aa, Artificial Sequence
  Description of Artificial Sequence: Synthetic peptide
  XENP021749 vhCDR2
WINPHSGGTNYAQKFQG

SEQ ID NO: 27041 - protein, 16 aa, Artificial Sequence
  Description of Artificial Sequence: Synthetic peptide
  XENP021749 vhCDR3
TYYYDSSGYYHDAFDI

SEQ ID NO: 27042 - protein, 477 aa, Artificial Sequence; identical to SEQ ID NO: 2394
  Description of Artificial Sequence: Synthetic polypeptide
  XENP021749 [anti-ICOS]_H0L0_Fab-[anti-CTLA-4]_H3.23 _L0.129_scFv scFv-Fc Heavy Chain

SEQ ID NO: 27043 - protein, 118 aa, Artificial Sequence; identical to SEQ ID NO: 2395
  Description of Artificial Sequence: Synthetic polypeptide
  VH of XENP021749

SEQ ID NO: 27044 - protein, 108 aa, Artificial Sequence; identical to SEQ ID NO: 2396
  Description of Artificial Sequence: Synthetic polypeptide
  VL of XENP021749

SEQ ID NO: 27045 - protein, 231 aa, Artificial Sequence; identical to SEQ ID NO: 2397
  Description of Artificial Sequence: Synthetic polypeptide
  Fc chain of XENP021749

SEQ ID NO: 27046 - protein, 5 aa, Artificial Sequence
  Description of Artificial Sequence: Synthetic peptide
  XENP021749 vhCDR1
SYTMH

SEQ ID NO: 27047 - protein, 17 aa, Artificial Sequence
  Description of Artificial Sequence: Synthetic peptide
  XENP021749 vhCDR2
FISYDGNYKYYADSVKG

SEQ ID NO: 27048 - protein, 9 aa, Artificial Sequence
  Description of Artificial Sequence: Synthetic peptide
  XENP021749 vhCDR3
GGHLGPFDL

SEQ ID NO: 27049 - protein, 12 aa, Artificial Sequence
  Description of Artificial Sequence: Synthetic peptide
  XENP021749 vlCDR1
RASQSVGSSYLA

SEQ ID NO: 27050 - protein, 7 aa, Artificial Sequence
  Description of Artificial Sequence: Synthetic peptide
  XENP021749 vlCDR2
GASSRAT

SEQ ID NO: 27051 - protein, 9 aa, Artificial Sequence
  Description of Artificial Sequence: Synthetic peptide
  XENP021749 vlCDR3
QQYGSSPWT

SEQ ID NO: 27052 - protein, 214 aa, Artificial Sequence; identical to SEQ ID NO: 26297
  Description of Artificial Sequence: Synthetic polypeptide
  XENP021749 [anti-ICOS]_H0L0_Fab-[anti-CTLA-4]_H3.23 _L0.129_scFv Light Chain

SEQ ID NO: 27053 - protein, 107 aa, Artificial Sequence; identical to SEQ ID NO: 26298
  Description of Artificial Sequence: Synthetic polypeptide
  VL of XENP021749

SEQ ID NO: 27054 - protein, 11 aa, Artificial Sequence
  Description of Artificial Sequence: Synthetic peptide
  XENP021749 vlCDR1
RASQGISRLLA

SEQ ID NO: 27055 - protein, 7 aa, Artificial Sequence
  Description of Artificial Sequence: Synthetic peptide
  XENP021749 vlCDR2
VASSLQS

SEQ ID NO: 27056 - protein, 9 aa, Artificial Sequence
  Description of Artificial Sequence: Synthetic peptide
  XENP021749 vlCDR3
QQANSFPWT

SEQ ID NO: 27057 - protein, 450 aa, Artificial Sequence; identical to SEQ ID NO: 2785
  Description of Artificial Sequence: Synthetic polypeptide
  XENP024359 7G8_H3.30_L1.34_Fab-[anti-ICOS]_H0L0_Fab Heavy Chain 1

SEQ ID NO: 27058 - protein, 121 aa, Artificial Sequence; identical to SEQ ID NO: 2516
  Description of Artificial Sequence: Synthetic polypeptide
  VH of XENP024359

SEQ ID NO: 27059 - protein, 5 aa, Artificial Sequence
  Description of Artificial Sequence: Synthetic peptide
  XENP024359 vhCDR1
DAWMS

SEQ ID NO: 27060 - protein, 19 aa, Artificial Sequence
  Description of Artificial Sequence: Synthetic peptide
  XENP024359 vhCDR2
EISTKANNHATYYAESVKG

SEQ ID NO: 27061 - protein, 10 aa, Artificial Sequence
  Description of Artificial Sequence: Synthetic peptide
  XENP024359 vhCDR3
LATWDWYFDV

SEQ ID NO: 27062 - protein, 454 aa, Artificial Sequence; identical to SEQ ID NO: 26942
  Description of Artificial Sequence: Synthetic polypeptide
  XENP024359 7G8_H3.30_L1.34_Fab-[anti-ICOS]_H0L0_Fab Heavy Chain 2

SEQ ID NO: 27063 - protein, 125 aa, Artificial Sequence; identical to SEQ ID NO: 26293
  Description of Artificial Sequence: Synthetic polypeptide
  VH of XENP024359

SEQ ID NO: 27064 - protein, 5 aa, Artificial Sequence
  Description of Artificial Sequence: Synthetic peptide
  XENP024359 vhCDR1
GYYMH

SEQ ID NO: 27065 - protein, 17 aa, Artificial Sequence
  Description of Artificial Sequence: Synthetic peptide
  XENP024359 vhCDR2
WINPHSGGTNYAQKFQG

SEQ ID NO: 27066 - protein, 16 aa, Artificial Sequence
  Description of Artificial Sequence: Synthetic peptide
  XENP024359 vhCDR3
TYYYDSSGYYHDAFDI

SEQ ID NO: 27067 - protein, 218 aa, Artificial Sequence; identical to SEQ ID NO: 2420
  Description of Artificial Sequence: Synthetic polypeptide
  XENP024359 7G8_H3.30_L1.34_Fab-[anti-ICOS]_H0L0_Fab Light Chain 1

SEQ ID NO: 27068 - protein, 111 aa, Artificial Sequence; identical to SEQ ID NO: 2421
  Description of Artificial Sequence: Synthetic polypeptide
  VL of XENP024359

SEQ ID NO: 27069 - protein, 15 aa, Artificial Sequence
  Description of Artificial Sequence: Synthetic peptide
  XENP024359 vlCDR1
RASQSVDYDGDSYMN

SEQ ID NO: 27070 - protein, 7 aa, Artificial Sequence
  Description of Artificial Sequence: Synthetic peptide
  XENP024359 vlCDR2
AASELES

SEQ ID NO: 27071 - protein, 9 aa, Artificial Sequence
  Description of Artificial Sequence: Synthetic peptide
  XENP024359 vlCDR3
QQSNEDPFT

SEQ ID NO: 27072 - protein, 214 aa, Artificial Sequence; identical to SEQ ID NO: 26297
  Description of Artificial Sequence: Synthetic polypeptide
  XENP024359 7G8_H3.30_L1.34_Fab-[anti-ICOS]_H0L0_Fab Light Chain 2

SEQ ID NO: 27073 - protein, 107 aa, Artificial Sequence; identical to SEQ ID NO: 26298
  Description of Artificial Sequence: Synthetic polypeptide
  VL of XENP024359

SEQ ID NO: 27074 - protein, 11 aa, Artificial Sequence
  Description of Artificial Sequence: Synthetic peptide
  XENP024359 vlCDR1
RASQGISRLLA

SEQ ID NO: 27075 - protein, 7 aa, Artificial Sequence
  Description of Artificial Sequence: Synthetic peptide
  XENP024359 vlCDR2
VASSLQS

SEQ ID NO: 27076 - protein, 9 aa, Artificial Sequence
  Description of Artificial Sequence: Synthetic peptide
  XENP024359 vlCDR3
QQANSFPWT

SEQ ID NO: 27077 - protein, 447 aa, Artificial Sequence; identical to SEQ ID NO: 2865
  Description of Artificial Sequence: Synthetic polypeptide
  XENP024360 2A11_H1.144_L2.142_Fab-[anti-ICOS]_H0L0_Fab Heavy Chain 1

SEQ ID NO: 27078 - protein, 118 aa, Artificial Sequence; identical to SEQ ID NO: 2646
  Description of Artificial Sequence: Synthetic polypeptide
  VH of XENP024360

SEQ ID NO: 27079 - protein, 5 aa, Artificial Sequence
  Description of Artificial Sequence: Synthetic peptide
  XENP024360 vhCDR1
DYFMH

SEQ ID NO: 27080 - protein, 17 aa, Artificial Sequence
  Description of Artificial Sequence: Synthetic peptide
  XENP024360 vhCDR2
WIDPELGDTEYAPKFQG

SEQ ID NO: 27081 - protein, 9 aa, Artificial Sequence
  Description of Artificial Sequence: Synthetic peptide
  XENP024360 vhCDR3
RGVYQALDY

SEQ ID NO: 27082 - protein, 454 aa, Artificial Sequence; identical to SEQ ID NO: 26942
  Description of Artificial Sequence: Synthetic polypeptide
  XENP024360 2A11_H1.144_L2.142_Fab-[anti-ICOS]_H0L0_Fab Heavy Chain 2

SEQ ID NO: 27083 - protein, 125 aa, Artificial Sequence; identical to SEQ ID NO: 26293
  Description of Artificial Sequence: Synthetic polypeptide
  VH of XENP024360

SEQ ID NO: 27084 - protein, 5 aa, Artificial Sequence
  Description of Artificial Sequence: Synthetic peptide
  XENP024360 vhCDR1
GYYMH

SEQ ID NO: 27085 - protein, 17 aa, Artificial Sequence
  Description of Artificial Sequence: Synthetic peptide
  XENP024360 vhCDR2
WINPHSGGTNYAQKFQG

SEQ ID NO: 27086 - protein, 16 aa, Artificial Sequence
  Description of Artificial Sequence: Synthetic peptide
  XENP024360 vhCDR3
TYYYDSSGYYHDAFDI

SEQ ID NO: 27087 - protein, 214 aa, Artificial Sequence; identical to SEQ ID NO: 2660
  Description of Artificial Sequence: Synthetic polypeptide
  XENP024360 2A11_H1.144_L2.142_Fab-[anti-ICOS]_H0L0_Fab Light Chain 1

SEQ ID NO: 27088 - protein, 107 aa, Artificial Sequence; identical to SEQ ID NO: 2661
  Description of Artificial Sequence: Synthetic polypeptide
  VL of XENP024360

SEQ ID NO: 27089 - protein, 11 aa, Artificial Sequence
  Description of Artificial Sequence: Synthetic peptide
  XENP024360 vlCDR1
QASQDIGNYLN

SEQ ID NO: 27090 - protein, 7 aa, Artificial Sequence
  Description of Artificial Sequence: Synthetic peptide
  XENP024360 vlCDR2
FTSYLHS

SEQ ID NO: 27091 - protein, 9 aa, Artificial Sequence
  Description of Artificial Sequence: Synthetic peptide
  XENP024360 vlCDR3
QQGNTLPYT

SEQ ID NO: 27092 - protein, 214 aa, Artificial Sequence; identical to SEQ ID NO: 26297
  Description of Artificial Sequence: Synthetic polypeptide
  XENP024360 2A11_H1.144_L2.142_Fab-[anti-ICOS]_H0L0_Fab Light Chain 2

SEQ ID NO: 27093 - protein, 107 aa, Artificial Sequence; identical to SEQ ID NO: 26298
  Description of Artificial Sequence: Synthetic polypeptide
  VL of XENP024360

SEQ ID NO: 27094 - protein, 11 aa, Artificial Sequence
  Description of Artificial Sequence: Synthetic peptide
  XENP024360 vlCDR1
RASQGISRLLA

SEQ ID NO: 27095 - protein, 7 aa, Artificial Sequence
  Description of Artificial Sequence: Synthetic peptide
  XENP024360 vlCDR2
VASSLQS

SEQ ID NO: 27096 - protein, 9 aa, Artificial Sequence
  Description of Artificial Sequence: Synthetic peptide
  XENP024360 vlCDR3
QQANSFPWT

SEQ ID NO: 27097 - protein, 446 aa, Artificial Sequence
  Description of Artificial Sequence: Synthetic polypeptide
  XENP024361 3H3_H1_L2.1_Fab-[anti-ICOS]_H0L0_Fab Heavy Chain 1
QVTLKESGPVLVKPTETLTLTCTVSGFSLNGYGVNWVRQPPGKGLEWLAMIWGDGSTDYNSALKSRLTISKDNSKSQVVLTMTNMDPVDTATYYCARSYYTSDEDYWGQGTLVTVSSASTKGPSVFPLAPSSKSTSGGTAALGCLVKDYFPEPVTVSWNSGALTSGVHTFPAVLQSSGLYSLSSVVTVPSSSLGTQTYICNVNHKPSDTKVDKKVEPKSCDKTHTCPPCPAPPVAGPSVFLFPPKPKDTLMISRTPEVTCVVVDVKHEDPEVKFNWYVDGVEVHNAKTKPREEEYNSTYRVVSVLTVLHQDWLNGKEYKCKVSNKALPAPIEKTISKAKGQPREPQVYTLPPSREEMTKNQVSLTCDVSGFYPSDIAVEWESDGQPENNYKTTPPVLDSDGSFFLYSKLTVDKSRWEQGDVFSCSVMHEALHNHYTQKSLSLSPGK

SEQ ID NO: 27098 - protein, 117 aa, Artificial Sequence; identical to SEQ ID NO: 3366
  Description of Artificial Sequence: Synthetic polypeptide
  VH of XENP024361

SEQ ID NO: 27099 - protein, 5 aa, Artificial Sequence
  Description of Artificial Sequence: Synthetic peptide
  XENP024361 vhCDR1
GYGVN

SEQ ID NO: 27100 - protein, 16 aa, Artificial Sequence
  Description of Artificial Sequence: Synthetic peptide
  XENP024361 vhCDR2
MIWGDGSTDYNSALKS

SEQ ID NO: 27101 - protein, 9 aa, Artificial Sequence
  Description of Artificial Sequence: Synthetic peptide
  XENP024361 vhCDR3
SYYTSDEDY

SEQ ID NO: 27102 - protein, 454 aa, Artificial Sequence; identical to SEQ ID NO: 26942
  Description of Artificial Sequence: Synthetic polypeptide
  XENP024361 3H3_H1_L2.1_Fab-[anti-ICOS]_H0L0_Fab Heavy Chain 2

SEQ ID NO: 27103 - protein, 125 aa, Artificial Sequence; identical to SEQ ID NO: 26293
  Description of Artificial Sequence: Synthetic polypeptide
  VH of XENP024361

SEQ ID NO: 27104 - protein, 5 aa, Artificial Sequence
  Description of Artificial Sequence: Synthetic peptide
  XENP024361 vhCDR1
GYYMH

SEQ ID NO: 27105 - protein, 17 aa, Artificial Sequence
  Description of Artificial Sequence: Synthetic peptide
  XENP024361 vhCDR2
WINPHSGGTNYAQKFQG

SEQ ID NO: 27106 - protein, 16 aa, Artificial Sequence
  Description of Artificial Sequence: Synthetic peptide
  XENP024361 vhCDR3
TYYYDSSGYYHDAFDI

SEQ ID NO: 27107 - protein, 219 aa, Artificial Sequence; identical to SEQ ID NO: 3510
  Description of Artificial Sequence: Synthetic polypeptide
  XENP024361 3H3_H1_L2.1_Fab-[anti-ICOS]_H0L0_Fab Light Chain 1

SEQ ID NO: 27108 - protein, 112 aa, Artificial Sequence; identical to SEQ ID NO: 3511
  Description of Artificial Sequence: Synthetic polypeptide
  VL of XENP024361

SEQ ID NO: 27109 - protein, 17 aa, Artificial Sequence
  Description of Artificial Sequence: Synthetic peptide
  XENP024361 vlCDR1
KSSQSLLNSRTRKNYLA

SEQ ID NO: 27110 - protein, 7 aa, Artificial Sequence
  Description of Artificial Sequence: Synthetic peptide
  XENP024361 vlCDR2
WASTRES

SEQ ID NO: 27111 - protein, 8 aa, Artificial Sequence
  Description of Artificial Sequence: Synthetic peptide
  XENP024361 vlCDR3
KQSYSLRT

SEQ ID NO: 27112 - protein, 214 aa, Artificial Sequence; identical to SEQ ID NO: 26297
  Description of Artificial Sequence: Synthetic polypeptide
  XENP024361 3H3_H1_L2.1_Fab-[anti-ICOS]_H0L0_Fab Light Chain 2

SEQ ID NO: 27113 - protein, 107 aa, Artificial Sequence; identical to SEQ ID NO: 26298
  Description of Artificial Sequence: Synthetic polypeptide
  VL of XENP024361

SEQ ID NO: 27114 - protein, 11 aa, Artificial Sequence
  Description of Artificial Sequence: Synthetic peptide
  XENP024361 vlCDR1
RASQGISRLLA

SEQ ID NO: 27115 - protein, 7 aa, Artificial Sequence
  Description of Artificial Sequence: Synthetic peptide
  XENP024361 vlCDR2
VASSLQS

SEQ ID NO: 27116 - protein, 9 aa, Artificial Sequence
  Description of Artificial Sequence: Synthetic peptide
  XENP024361 vlCDR3
QQANSFPWT

SEQ ID NO: 27117 - protein, 447 aa, Artificial Sequence
  Description of Artificial Sequence: Synthetic polypeptide
  XENP021748 YW243.55.S70[PD-L1]_H0L0_Fab-[anti-ICOS]_H0L0 _scFv Fab-Fc Heavy Chain
EVQLVESGGGLVQPGGSLRLSCAASGFTFSDSWIHWVRQAPGKGLEWVAWISPYGGSTYYADSVKGRFTISADTSKNTAYLQMNSLRAEDTAVYYCARRHWPGGFDYWGQGTLVTVSSASTKGPSVFPLAPSSKSTSGGTAALGCLVKDYFPEPVTVSWNSGALTSGVHTFPAVLQSSGLYSLSSVVTVPSSSLGTQTYICNVNHKPSDTKVDKKVEPKSCDKTHTCPPCPAPPVAGPSVFLFPPKPKDTLMISRTPEVTCVVVDVKHEDPEVKFNWYVDGVEVHNAKTKPREEEYNSTYRVVSVLTVLHQDWLNGKEYKCKVSNKALPAPIEKTISKAKGQPREPQVYTLPPSREEMTKNQVSLTCDVSGFYPSDIAVEWESDGQPENNYKTTPPVLDSDGSFFLYSKLTVDKSRWEQGDVFSCSVMHEALHNHYTQKSLSLSPGK

SEQ ID NO: 27118 - protein, 118 aa, Artificial Sequence [sequence omitted]

SEQ ID NO: 27119 - protein, 5 aa, Artificial Sequence
  Description of Artificial Sequence: Synthetic peptide
  XENP021748 vhCDR1
DSWIH

SEQ ID NO: 27120 - protein, 17 aa, Artificial Sequence
  Description of Artificial Sequence: Synthetic peptide
  XENP021748 vhCDR2
WISPYGGSTYYADSVKG

SEQ ID NO: 27121 - protein, 9 aa, Artificial Sequence
  Description of Artificial Sequence: Synthetic peptide
  XENP021748 vhCDR3
RHWPGGFDY

SEQ ID NO: 27122 - protein, 483 aa, Artificial Sequence; identical to SEQ ID NO: 26827
  Description of Artificial Sequence: Synthetic polypeptide
  XENP021748 YW243.55.S70[PD-L1]_H0L0_Fab-[anti-ICOS]_H0L0 _scFv scFv-Fc Heavy Chain

SEQ ID NO: 27123 - protein, 125 aa, Artificial Sequence; identical to SEQ ID NO: 26293
  Description of Artificial Sequence: Synthetic polypeptide
  VH of XENP021748

SEQ ID NO: 27124 - protein, 107 aa, Artificial Sequence; identical to SEQ ID NO: 26298
  Description of Artificial Sequence: Synthetic polypeptide
  VL of XENP021748

SEQ ID NO: 27125 - protein, 231 aa, Artificial Sequence; identical to SEQ ID NO: 2397
  Description of Artificial Sequence: Synthetic polypeptide
  Fc chain of XENP021748

SEQ ID NO: 27126 - protein, 5 aa, Artificial Sequence
  Description of Artificial Sequence: Synthetic peptide
  XENP021748 vhCDR1
GYYMH

SEQ ID NO: 27127 - protein, 17 aa, Artificial Sequence
  Description of Artificial Sequence: Synthetic peptide
  XENP021748 vhCDR2
WINPHSGGTNYAQKFQG

SEQ ID NO: 27128 - protein, 16 aa, Artificial Sequence
  Description of Artificial Sequence: Synthetic peptide
  XENP021748 vhCDR3
TYYYDSSGYYHDAFDI

SEQ ID NO: 27129 - protein, 11 aa, Artificial Sequence
  Description of Artificial Sequence: Synthetic peptide
  XENP021748 vlCDR1
RASQGISRLLA

SEQ ID NO: 27130 - protein, 7 aa, Artificial Sequence
  Description of Artificial Sequence: Synthetic peptide
  XENP021748 vlCDR2
VASSLQS

SEQ ID NO: 27131 - protein, 9 aa, Artificial Sequence
  Description of Artificial Sequence: Synthetic peptide
  XENP021748 vlCDR3
QQANSFPWT

SEQ ID NO: 27132 - protein, 214 aa, Artificial Sequence
  Description of Artificial Sequence: Synthetic polypeptide
  XENP021748 YW243.55.S70[PD-L1]_H0L0_Fab-[anti-ICOS]_H0L0 _scFv Light Chain
DIQMTQSPSSLSASVGDRVTITCRASQDVSTAVAWYQQKPGKAPKLLIYSASFLYSGVPSRFSGSGSGTDFTLTISSLQPEDFATYYCQQYLYHPATFGQGTKVEIKRTVAAPSVFIFPPSDEQLKSGTASVVCLLNNFYPREAKVQWKVDNALQSGNSQESVTEQDSKDSTYSLSSTLTLSKADYEKHKVYACEVTHQGLSSPVTKSFNRGEC

SEQ ID NO: 27133 - protein, 107 aa, Artificial Sequence [sequence omitted]

SEQ ID NO: 27134 - protein, 11 aa, Artificial Sequence
  Description of Artificial Sequence: Synthetic peptide
  XENP021748 vlCDR1
RASQDVSTAVA

SEQ ID NO: 27135 - protein, 7 aa, Artificial Sequence
  Description of Artificial Sequence: Synthetic peptide
  XENP021748 vlCDR2
SASFLYS

SEQ ID NO: 27136 - protein, 9 aa, Artificial Sequence
  Description of Artificial Sequence: Synthetic peptide
  XENP021748 vlCDR3
QQYLYHPAT

SEQ ID NO: 27137 - protein, 450 aa, Artificial Sequence
  Description of Artificial Sequence: Synthetic polypeptide
  XENP024129 durvalumab[PD-L1]_H1L1_Fab-[anti-ICOS]_H0L0 _scFv Fab-Fc Heavy Chain
EVQLVESGGGLVQPGGSLRLSCAASGFTFSRYWMSWVRQAPGKGLEWVANIKQDGSEKYYVDSVKGRFTISRDNAKNSLYLQMNSLRAEDTAVYYCAREGGWFGELAFDYWGQGTLVTVSSASTKGPSVFPLAPSSKSTSGGTAALGCLVKDYFPEPVTVSWNSGALTSGVHTFPAVLQSSGLYSLSSVVTVPSSSLGTQTYICNVNHKPSDTKVDKKVEPKSCDKTHTCPPCPAPPVAGPSVFLFPPKPKDTLMISRTPEVTCVVVDVKHEDPEVKFNWYVDGVEVHNAKTKPREEEYNSTYRVVSVLTVLHQDWLNGKEYKCKVSNKALPAPIEKTISKAKGQPREPQVYTLPPSREEMTKNQVSLTCDVSGFYPSDIAVEWESDGQPENNYKTTPPVLDSDGSFFLYSKLTVDKSRWEQGDVFSCSVMHEALHNHYTQKSLSLSPGK

SEQ ID NO: 27138 - protein, 121 aa, Artificial Sequence; identical to SEQ ID NO: 3961
  Description of Artificial Sequence: Synthetic polypeptide
  VH of XENP024129

SEQ ID NO: 27139 - protein, 5 aa, Artificial Sequence
  Description of Artificial Sequence: Synthetic peptide
  XENP024129 vhCDR1
RYWMS

SEQ ID NO: 27140 - protein, 17 aa, Artificial Sequence
  Description of Artificial Sequence: Synthetic peptide
  XENP024129 vhCDR2
NIKQDGSEKYYVDSVKG

SEQ ID NO: 27141 - protein, 12 aa, Artificial Sequence
  Description of Artificial Sequence: Synthetic peptide
  XENP024129 vhCDR3
EGGWFGELAFDY

SEQ ID NO: 27142 - protein, 483 aa, Artificial Sequence; identical to SEQ ID NO: 26827
  Description of Artificial Sequence: Synthetic polypeptide
  XENP024129 durvalumab[PD-L1]_H1L1_Fab-[anti-ICOS]_H0L0 _scFv scFv-Fc Heavy Chain

SEQ ID NO: 27143 - protein, 125 aa, Artificial Sequence; identical to SEQ ID NO: 26293
  Description of Artificial Sequence: Synthetic polypeptide
  VH of XENP024129

SEQ ID NO: 27144 - protein, 107 aa, Artificial Sequence; identical to SEQ ID NO: 26298
  Description of Artificial Sequence: Synthetic polypeptide
  VL of XENP024129

SEQ ID NO: 27145 - protein, 231 aa, Artificial Sequence; identical to SEQ ID NO: 2397
  Description of Artificial Sequence: Synthetic polypeptide
  Fc chain of XENP024129

SEQ ID NO: 27146 - protein, 5 aa, Artificial Sequence
  Description of Artificial Sequence: Synthetic peptide
  XENP024129 vhCDR1
GYYMH

SEQ ID NO: 27147 - protein, 17 aa, Artificial Sequence
  Description of Artificial Sequence: Synthetic peptide
  XENP024129 vhCDR2
WINPHSGGTNYAQKFQG

SEQ ID NO: 27148 - protein, 16 aa, Artificial Sequence
  Description of Artificial Sequence: Synthetic peptide
  XENP024129 vhCDR3
TYYYDSSGYYHDAFDI

SEQ ID NO: 27149 - protein, 11 aa, Artificial Sequence
  Description of Artificial Sequence: Synthetic peptide
  XENP024129 vlCDR1
RASQGISRLLA

SEQ ID NO: 27150 - protein, 7 aa, Artificial Sequence
  Description of Artificial Sequence: Synthetic peptide
  XENP024129 vlCDR2
VASSLQS

SEQ ID NO: 27151 - protein, 9 aa, Artificial Sequence
  Description of Artificial Sequence: Synthetic peptide
  XENP024129 vlCDR3
QQANSFPWT

SEQ ID NO: 27152 - protein, 215 aa, Artificial Sequence
  Description of Artificial Sequence: Synthetic polypeptide
  XENP024129 durvalumab[PD-L1]_H1L1_Fab-[anti-ICOS]_H0L0 _scFv Light Chain
EIVLTQSPGTLSLSPGERATLSCRASQRVSSSYLAWYQQKPGQAPRLLIYDASSRATGIPDRFSGSGSGTDFTLTISRLEPEDFAVYYCQQYGSLPWTFGQGTKVEIKRTVAAPSVFIFPPSDEQLKSGTASVVCLLNNFYPREAKVQWKVDNALQSGNSQESVTEQDSKDSTYSLSSTLTLSKADYEKHKVYACEVTHQGLSSPVTKSFNRGEC

SEQ ID NO: 27153 - protein, 108 aa, Artificial Sequence; identical to SEQ ID NO: 3965
  Description of Artificial Sequence: Synthetic polypeptide
  VL of XENP024129

SEQ ID NO: 27154 - protein, 12 aa, Artificial Sequence
  Description of Artificial Sequence: Synthetic peptide
  XENP024129 vlCDR1
RASQRVSSSYLA

SEQ ID NO: 27155 - protein, 7 aa, Artificial Sequence
  Description of Artificial Sequence: Synthetic peptide
  XENP024129 vlCDR2
DASSRAT

SEQ ID NO: 27156 - protein, 9 aa, Artificial Sequence
  Description of Artificial Sequence: Synthetic peptide
  XENP024129 vlCDR3
QQYGSLPWT

SEQ ID NO: 27157 - protein, 449 aa, Artificial Sequence
  Description of Artificial Sequence: Synthetic polypeptide
  XENP024131 avelumab[PD-L1]_H1L1_Fab-[anti-ICOS]_H0L0 _scFv Fab-Fc Heavy Chain
EVQLLESGGGLVQPGGSLRLSCAASGFTFSSYIMMWVRQAPGKGLEWVSSIYPSGGITFYADTVKGRFTISRDNSKNTLYLQMNSLRAEDTAVYYCARIKLGTVTTVDYWGQGTLVTVSSASTKGPSVFPLAPSSKSTSGGTAALGCLVKDYFPEPVTVSWNSGALTSGVHTFPAVLQSSGLYSLSSVVTVPSSSLGTQTYICNVNHKPSDTKVDKKVEPKSCDKTHTCPPCPAPPVAGPSVFLFPPKPKDTLMISRTPEVTCVVVDVKHEDPEVKFNWYVDGVEVHNAKTKPREEEYNSTYRVVSVLTVLHQDWLNGKEYKCKVSNKALPAPIEKTISKAKGQPREPQVYTLPPSREEMTKNQVSLTCDVSGFYPSDIAVEWESDGQPENNYKTTPPVLDSDGSFFLYSKLTVDKSRWEQGDVFSCSVMHEALHNHYTQKSLSLSPGK

SEQ ID NO: 27158 - protein, 120 aa, Artificial Sequence; identical to SEQ ID NO: 3977
  Description of Artificial Sequence: Synthetic polypeptide
  VH of XENP024131

SEQ ID NO: 27159 - protein, 5 aa, Artificial Sequence
  Description of Artificial Sequence: Synthetic peptide
  XENP024131 vhCDR1
SYIMM

SEQ ID NO: 27160 - protein, 17 aa, Artificial Sequence
  Description of Artificial Sequence: Synthetic peptide
  XENP024131 vhCDR2
SIYPSGGITFYADTVKG

SEQ ID NO: 27161 - protein, 11 aa, Artificial Sequence
  Description of Artificial Sequence: Synthetic peptide
  XENP024131 vhCDR3
IKLGTVTTVDY

SEQ ID NO: 27162 - protein, 483 aa, Artificial Sequence; identical to SEQ ID NO: 26827
  Description of Artificial Sequence: Synthetic polypeptide
  XENP024131 avelumab[PD-L1]_H1L1_Fab-[anti-ICOS]_H0L0 _scFv scFv-Fc Heavy Chain

SEQ ID NO: 27163 - protein, 125 aa, Artificial Sequence; identical to SEQ ID NO: 26293
  Description of Artificial Sequence: Synthetic polypeptide
  VH of XENP024131

SEQ ID NO: 27164 - protein, 107 aa, Artificial Sequence; identical to SEQ ID NO: 26298
  Description of Artificial Sequence: Synthetic polypeptide
  VL of XENP024131

SEQ ID NO: 27165 - protein, 231 aa, Artificial Sequence; identical to SEQ ID NO: 2397
  Description of Artificial Sequence: Synthetic polypeptide
  Fc chain of XENP024131

SEQ ID NO: 27166 - protein, 5 aa, Artificial Sequence
  Description of Artificial Sequence: Synthetic peptide
  XENP024131 vhCDR1
GYYMH

SEQ ID NO: 27167 - protein, 17 aa, Artificial Sequence
  Description of Artificial Sequence: Synthetic peptide
  XENP024131 vhCDR2
WINPHSGGTNYAQKFQG

SEQ ID NO: 27168 - protein, 16 aa, Artificial Sequence
  Description of Artificial Sequence: Synthetic peptide
  XENP024131 vhCDR3
TYYYDSSGYYHDAFDI

SEQ ID NO: 27169 - protein, 11 aa, Artificial Sequence
  Description of Artificial Sequence: Synthetic peptide
  XENP024131 vlCDR1
RASQGISRLLA

SEQ ID NO: 27170 - protein, 7 aa, Artificial Sequence
  Description of Artificial Sequence: Synthetic peptide
  XENP024131 vlCDR2
VASSLQS

SEQ ID NO: 27171 - protein, 9 aa, Artificial Sequence
  Description of Artificial Sequence: Synthetic peptide
  XENP024131 vlCDR3
QQANSFPWT

SEQ ID NO: 27172 - protein, 216 aa, Artificial Sequence
  Description of Artificial Sequence: Synthetic polypeptide
  XENP024131 avelumab[PD-L1]_H1L1_Fab-[anti-ICOS]_H0L0 _scFv Light Chain
QSALTQPASVSGSPGQSITISCTGTSSDVGGYNYVSWYQQHPGKAPKLMIYDVSNRPSGVSNRFSGSKSGNTASLTISGLQAEDEADYYCSSYTSSSTRVFGTGTKVTVLGQPKAAPSVTLFPPSSEELQANKATLVCLISDFYPGAVTVAWKADSSPVKAGVETTTPSKQSNNKYAASSYLSLTPEQWKSHRSYSCQVTHEGSTVEKTVAPTECS

SEQ ID NO: 27173 - protein, 110 aa, Artificial Sequence; identical to SEQ ID NO: 3981
  Description of Artificial Sequence: Synthetic polypeptide
  VL of XENP024131

SEQ ID NO: 27174 - protein, 14 aa, Artificial Sequence
  Description of Artificial Sequence: Synthetic peptide
  XENP024131 vlCDR1
TGTSSDVGGYNYVS

SEQ ID NO: 27175 - protein, 7 aa, Artificial Sequence
  Description of Artificial Sequence: Synthetic peptide
  XENP024131 vlCDR2
DVSNRPS

SEQ ID NO: 27176 - protein, 10 aa, Artificial Sequence
  Description of Artificial Sequence: Synthetic peptide
  XENP024131 vlCDR3
SSYTSSSTRV

SEQ ID NO: 27177 - protein, 721 aa, Artificial Sequence
  Description of Artificial Sequence: Synthetic polypeptide
  XENP024124 durvalumab[PD-L1]_H1L1_Fab_(G4S)2_[anti-ICOS]_H0L0 _scFv20_Fc_IgG1 Heavy Chain
EVQLVESGGGLVQPGGSLRLSCAASGFTFSRYWMSWVRQAPGKGLEWVANIKQDGSEKYYVDSVKGRFTISRDNAKNSLYLQMNSLRAEDTAVYYCAREGGWFGELAFDYWGQGTLVTVSSASTKGPSVFPLAPSSKSTSGGTAALGCLVKDYFPEPVTVSWNSGALTSGVHTFPAVLQSSGLYSLSSVVTVPSSSLGTQTYICNVNHKPSNTKVDKKVEPKSCGGGGSGGGGSQVQLVQSGAEVKKPGASVKVSCKASGYTFTGYYMHWVRQAPGQGLEWMGWINPHSGGTNYAQKFQGRVTMTRDTSISTAYMELSRLRSDDTAVYYCARTYYYDSSGYYHDAFDIWGQGTMVTVSSGGGGSGGGGSGGGGSGGGGSDIQMTQSPSSVSASVGDRVTITCRASQGISRLLAWYQQKPGKAPKLLIYVASSLQSGVPSRFSGSGSGTDFTLTISSLQPEDFATYYCQQANSFPWTFGQGTKVEIKGGGGSGGGGSKTHTCPPCPAPPVAGPSVFLFPPKPKDTLMISRTPEVTCVVVDVKHEDPEVKFNWYVDGVEVHNAKTKPREEQYNSTYRVVSVLTVLHQDWLNGKEYKCKVSNKALPAPIEKTISKAKGQPREPQVYTLPPSREEMTKNQVSLTCLVKGFYPSDIAVEWESNGQPENNYKTTPPVLDSDGSFFLYSKLTVDKSRWQQGNVFSCSVMHEALHNHYTQKSLSLSPGK

SEQ ID NO: 27178 - protein, 121 aa, Artificial Sequence; identical to SEQ ID NO: 3961
  Description of Artificial Sequence: Synthetic polypeptide
  VH of XENP024124

SEQ ID NO: 27179 - protein, 113 aa, Artificial Sequence; identical to SEQ ID NO: 26907
  Description of Artificial Sequence: Synthetic polypeptide
  Fc chain of XENP024124

SEQ ID NO: 27180 - protein, 125 aa, Artificial Sequence; identical to SEQ ID NO: 26293
  Description of Artificial Sequence: Synthetic polypeptide
  VL of XENP024124

SEQ ID NO: 27181 - protein, 225 aa, Artificial Sequence; identical to SEQ ID NO: 26909
  Description of Artificial Sequence: Synthetic polypeptide
  Fc chain of XENP024124

SEQ ID NO: 27182 - protein, 5 aa, Artificial Sequence
  Description of Artificial Sequence: Synthetic peptide
  XENP024124 vhCDR1
RYWMS

SEQ ID NO: 27183 - protein, 17 aa, Artificial Sequence
  Description of Artificial Sequence: Synthetic peptide
  XENP024124 vhCDR2
NIKQDGSEKYYVDSVKG

SEQ ID NO: 27184 - protein, 12 aa, Artificial Sequence
  Description of Artificial Sequence: Synthetic peptide
  XENP024124 vhCDR3
EGGWFGELAFDY

SEQ ID NO: 27185 - protein, 5 aa, Artificial Sequence
  Description of Artificial Sequence: Synthetic peptide
  XENP024124 vlCDR1
GYYMH

SEQ ID NO: 27186 - protein, 17 aa, Artificial Sequence
  Description of Artificial Sequence: Synthetic peptide
  XENP024124 vlCDR2
WINPHSGGTNYAQKFQG

SEQ ID NO: 27187 - protein, 16 aa, Artificial Sequence
  Description of Artificial Sequence: Synthetic peptide
  XENP024124 vlCDR3
TYYYDSSGYYHDAFDI

SEQ ID NO: 27188 - protein, 215 aa, Artificial Sequence; identical to SEQ ID NO: 27152
  Description of Artificial Sequence: Synthetic polypeptide
  XENP024124 durvalumab[PD-L1]_H1L1_Fab_(G4S)2_[anti-ICOS]_H0L0 _scFv20_Fc_IgG1 Light Chain

SEQ ID NO: 27189 - protein, 108 aa, Artificial Sequence; identical to SEQ ID NO: 3965
  Description of Artificial Sequence: Synthetic polypeptide
  VL of XENP024124

SEQ ID NO: 27190 - protein, 12 aa, Artificial Sequence
  Description of Artificial Sequence: Synthetic peptide
  XENP024124 vlCDR1
RASQRVSSSYLA

SEQ ID NO: 27191 - protein, 7 aa, Artificial Sequence
  Description of Artificial Sequence: Synthetic peptide
  XENP024124 vlCDR2
DASSRAT

SEQ ID NO: 27192 - protein, 9 aa, Artificial Sequence
  Description of Artificial Sequence: Synthetic peptide
  XENP024124 vlCDR3
QQYGSLPWT

SEQ ID NO: 27193 - protein, 454 aa, Artificial Sequence; identical to SEQ ID NO: 26442
  Description of Artificial Sequence: Synthetic polypeptide
  XENP020266 [ICOS]_H0L0 one-arm mAb Fab-Fc Heavy Chain

SEQ ID NO: 27194 - protein, 125 aa, Artificial Sequence; identical to SEQ ID NO: 26293
  Description of Artificial Sequence: Synthetic polypeptide
  VH of XENP020266

SEQ ID NO: 27195 - protein, 5 aa, Artificial Sequence
  Description of Artificial Sequence: Synthetic peptide
  XENP020266 vhCDR1
GYYMH

SEQ ID NO: 27196 - protein, 17 aa, Artificial Sequence
  Description of Artificial Sequence: Synthetic peptide
  XENP020266 vhCDR2
WINPHSGGTNYAQKFQG

SEQ ID NO: 27197 - protein, 16 aa, Artificial Sequence
  Description of Artificial Sequence: Synthetic peptide
  XENP020266 vhCDR3
TYYYDSSGYYHDAFDI

SEQ ID NO: 27198 - protein, 231 aa, Artificial Sequence
  Description of Artificial Sequence: Synthetic polypeptide
  XENP020266 [ICOS]_H0L0 one-arm mAb Fc-only Heavy Chain
ERKSSDKTHTCPRCPAPPVAGPSVFLFPPKPKDTLMISRTPEVTCVVVDVKHEDPEVKFKWYVDGVEVHNAKTKPREEQYNSTYRVVSVLTVLHQDWLNGKEYKCKVSNKALPAPIEKTISKAKGQPREPQVYTLPPSREQMTKNQVKLTCLVKGFYPSDIAVEWESNGQPENNYKTTPPVLDSDGSFFLYSKLTVDKSRWQQGNVFSCSVMHEALHNHYTQKSLSLSPGK

SEQ ID NO: 27199 - protein, 214 aa, Artificial Sequence; identical to SEQ ID NO: 26297
  Description of Artificial Sequence: Synthetic polypeptide
  XENP020266 [ICOS]_H0L0 one-arm mAb Light Chain

SEQ ID NO: 27200 - protein, 107 aa, Artificial Sequence; identical to SEQ ID NO: 26298
  Description of Artificial Sequence: Synthetic polypeptide
  VL of XENP020266

SEQ ID NO: 27201 - protein, 11 aa, Artificial Sequence
  Description of Artificial Sequence: Synthetic peptide
  XENP020266 vlCDR1
RASQGISRLLA

SEQ ID NO: 27202 - protein, 7 aa, Artificial Sequence
  Description of Artificial Sequence: Synthetic peptide
  XENP020266 vlCDR2
VASSLQS

SEQ ID NO: 27203 - protein, 9 aa, Artificial Sequence
  Description of Artificial Sequence: Synthetic peptide
  XENP020266 vlCDR3
QQANSFPWT

SEQ ID NO: 27204 - protein, 452 aa, Artificial Sequence; identical to SEQ ID NO: 26682
  Description of Artificial Sequence: Synthetic polypeptide
  XENP021861 GSK_314.8[ICOS]_H0L0 one-arm mAb Fab-Fc Heavy Chain

SEQ ID NO: 27205 - protein, 123 aa, Artificial Sequence; identical to SEQ ID NO: 26303
  Description of Artificial Sequence: Synthetic polypeptide
  VH of XENP021861

SEQ ID NO: 27206 - protein, 5 aa, Artificial Sequence
  Description of Artificial Sequence: Synthetic peptide
  XENP021861 vhCDR1
TYWMH

SEQ ID NO: 27207 - protein, 17 aa, Artificial Sequence
  Description of Artificial Sequence: Synthetic peptide
  XENP021861 vhCDR2
EIDPSDSYVNYNQNFKG

SEQ ID NO: 27208 - protein, 14 aa, Artificial Sequence
  Description of Artificial Sequence: Synthetic peptide
  XENP021861 vhCDR3
SPDYYGTSLAWFDY

SEQ ID NO: 27209 - protein, 231 aa, Artificial Sequence; identical to SEQ ID NO: 27198
  Description of Artificial Sequence: Synthetic polypeptide
  XENP021861 GSK_314.8[ICOS]_H0L0 one-arm mAb Fc-only Heavy Chain

SEQ ID NO: 27210 - protein, 219 aa, Artificial Sequence; identical to SEQ ID NO: 26307
  Description of Artificial Sequence: Synthetic polypeptide
  XENP021861 GSK_314.8[ICOS]_H0L0 one-arm mAb Light Chain

SEQ ID NO: 27211 - protein, 112 aa, Artificial Sequence; identical to SEQ ID NO: 26308
  Description of Artificial Sequence: Synthetic polypeptide
  VL of XENP021861

SEQ ID NO: 27212 - protein, 16 aa, Artificial Sequence
  Description of Artificial Sequence: Synthetic peptide
  XENP021861 vlCDR1
RSSKSPLHSNGNIYLY

SEQ ID NO: 27213 - protein, 7 aa, Artificial Sequence
  Description of Artificial Sequence: Synthetic peptide
  XENP021861 vlCDR2
RMSNLAS

SEQ ID NO: 27214 - protein, 9 aa, Artificial Sequence
  Description of Artificial Sequence: Synthetic peptide
  XENP021861 vlCDR3
MQHLEYPYT

SEQ ID NO: 27215 - protein, 454 aa, Artificial Sequence; identical to SEQ ID NO: 26722
  Description of Artificial Sequence: Synthetic polypeptide
  XENP021863 jMab-138[ICOS]_H0L0 one-arm mAb Fab-Fc Heavy Chain

SEQ ID NO: 27216 - protein, 125 aa, Artificial Sequence; identical to SEQ ID NO: 26323
  Description of Artificial Sequence: Synthetic polypeptide
  VH of XENP021863

SEQ ID NO: 27217 - protein, 5 aa, Artificial Sequence
  Description of Artificial Sequence: Synthetic peptide
  XENP021863 vhCDR1
SYDMH

SEQ ID NO: 27218 - protein, 16 aa, Artificial Sequence
  Description of Artificial Sequence: Synthetic peptide
  XENP021863 vhCDR2
AIGTAGDTYYPGSVKG

SEQ ID NO: 27219 - protein, 17 aa, Artificial Sequence
  Description of Artificial Sequence: Synthetic peptide
  XENP021863 vhCDR3
DNRKVTHEHYYYYGMDV

SEQ ID NO: 27220 - protein, 231 aa, Artificial Sequence; identical to SEQ ID NO: 27198
  Description of Artificial Sequence: Synthetic polypeptide
  XENP021863 jMab-138[ICOS]_H0L0 one-arm mAb Fc-only Heavy Chain

SEQ ID NO: 27221 - protein, 216 aa, Artificial Sequence; identical to SEQ ID NO: 26327
  Description of Artificial Sequence: Synthetic polypeptide
  XENP021863 jMab-138[ICOS]_H0L0 one-arm mAb Light Chain

SEQ ID NO: 27222 - protein, 109 aa, Artificial Sequence; identical to SEQ ID NO: 26328
  Description of Artificial Sequence: Synthetic polypeptide
  VL of XENP021863

SEQ ID NO: 27223 - protein, 12 aa, Artificial Sequence
  Description of Artificial Sequence: Synthetic peptide
  XENP021863 vlCDR1
RASQNIRSSYLA

SEQ ID NO: 27224 - protein, 7 aa, Artificial Sequence
  Description of Artificial Sequence: Synthetic peptide
  XENP021863 vlCDR2
GASSRAT

SEQ ID NO: 27225 - protein, 10 aa, Artificial Sequence
  Description of Artificial Sequence: Synthetic peptide
  XENP021863 vlCDR3
QQFGSSPMCS

SEQ ID NO: 27226 - protein, 450 aa, Artificial Sequence; identical to SEQ ID NO: 26762
  Description of Artificial Sequence: Synthetic polypeptide
  XENP022349 WO2016059602[ICOS]_GSK_H0L0 one-arm mAb Fab-Fc Heavy Chain

SEQ ID NO: 27227 - protein, 121 aa, Artificial Sequence; identical to SEQ ID NO: 26343
  Description of Artificial Sequence: Synthetic polypeptide
  VH of XENP022349

SEQ ID NO: 27228 - protein, 5 aa, Artificial Sequence
  Description of Artificial Sequence: Synthetic peptide
  XENP022349 vhCDR1
DYAMH

SEQ ID NO: 27229 - protein, 17 aa, Artificial Sequence
  Description of Artificial Sequence: Synthetic peptide
  XENP022349 vhCDR2
LISIYSDHTNYNQKFQG

SEQ ID NO: 27230 - protein, 12 aa, Artificial Sequence
  Description of Artificial Sequence: Synthetic peptide
  XENP022349 vhCDR3
NNYGNYGWYFDV

SEQ ID NO: 27231 - protein, 231 aa, Artificial Sequence; identical to SEQ ID NO: 27198
  Description of Artificial Sequence: Synthetic polypeptide
  XENP022349 WO2016059602[ICOS]_GSK_H0L0 one-arm mAb Fc-only Heavy Chain

SEQ ID NO: 27232 - protein, 213 aa, Artificial Sequence; identical to SEQ ID NO: 26347
  Description of Artificial Sequence: Synthetic polypeptide
  XENP022349 WO2016059602[ICOS]_GSK_H0L0 one-arm mAb Light Chain

SEQ ID NO: 27233 - protein, 106 aa, Artificial Sequence; identical to SEQ ID NO: 26348
  Description of Artificial Sequence: Synthetic polypeptide
  VL of XENP022349

SEQ ID NO: 27234 - protein, 10 aa, Artificial Sequence
  Description of Artificial Sequence: Synthetic peptide
  XENP022349 vlCDR1
SASSSVSYMH

SEQ ID NO: 27235 - protein, 7 aa, Artificial Sequence
  Description of Artificial Sequence: Synthetic peptide
  XENP022349 vlCDR2
DTSKLAS

SEQ ID NO: 27236 - protein, 9 aa, Artificial Sequence
  Description of Artificial Sequence: Synthetic peptide
  XENP022349 vlCDR3
FQGSGYPYT

SEQ ID NO: 27237 - protein, 454 aa, Artificial Sequence; identical to SEQ ID NO: 26442
  Description of Artificial Sequence: Synthetic polypeptide
  XENP022439 [ICOS]_H0_L0.5 one-arm mAb Fab-Fc Heavy Chain

SEQ ID NO: 27238 - protein, 125 aa, Artificial Sequence; identical to SEQ ID NO: 26293
  Description of Artificial Sequence: Synthetic polypeptide
  VH of XENP022439

SEQ ID NO: 27239 - protein, 5 aa, Artificial Sequence
  Description of Artificial Sequence: Synthetic peptide
  XENP022439 vhCDR1
GYYMH

SEQ ID NO: 27240 - protein, 17 aa, Artificial Sequence
  Description of Artificial Sequence: Synthetic peptide
  XENP022439 vhCDR2
WINPHSGGTNYAQKFQG

SEQ ID NO: 27241 - protein, 16 aa, Artificial Sequence
  Description of Artificial Sequence: Synthetic peptide
  XENP022439 vhCDR3
TYYYDSSGYYHDAFDI

SEQ ID NO: 27242 - protein, 231 aa, Artificial Sequence; identical to SEQ ID NO: 27198
  Description of Artificial Sequence: Synthetic polypeptide
  XENP022439 [ICOS]_H0_L0.5 one-arm mAb Fc-only Heavy Chain

SEQ ID NO: 27243 - protein, 214 aa, Artificial Sequence
  Description of Artificial Sequence: Synthetic polypeptide
  XENP022439 [ICOS]_H0_L0.5 one-arm mAb Light Chain
DIQMTQSPSSVSASVGDRVTITCRASQGISSLLAWYQQKPGKAPKLLIYVASSLQSGVPSRFSGSGSGTDFTLTISSLQPEDFATYYCQQANSFPWTFGQGTKVEIKRTVAAPSVFIFPPSDEQLKSGTASVVCLLNNFYPREAKVQWKVDNALQSGNSQESVTEQDSKDSTYSLSSTLTLSKADYEKHKVYACEVTHQGLSSPVTKSFNRGEC

SEQ ID NO: 27244 - protein, 107 aa, Artificial Sequence
  Description of Artificial Sequence: Synthetic polypeptide
  VL of XENP022439
DIQMTQSPSSVSASVGDRVTITCRASQGISSLLAWYQQKPGKAPKLLIYVASSLQSGVPSRFSGSGSGTDFTLTISSLQPEDFATYYCQQANSFPWTFGQGTKVEIK

SEQ ID NO: 27245 - protein, 11 aa, Artificial Sequence
  Description of Artificial Sequence: Synthetic peptide
  XENP022439 vlCDR1
RASQGISSLLA

SEQ ID NO: 27246 - protein, 7 aa, Artificial Sequence
  Description of Artificial Sequence: Synthetic peptide
  XENP022439 vlCDR2
VASSLQS

SEQ ID NO: 27247 - protein, 9 aa, Artificial Sequence
  Description of Artificial Sequence: Synthetic peptide
  XENP022439 vlCDR3
QQANSFPWT

SEQ ID NO: 27248 - protein, 454 aa, Artificial Sequence; identical to SEQ ID NO: 26442
  Description of Artificial Sequence: Synthetic polypeptide
  XENP022440 [ICOS]_H0_L0.7 one-arm mAb Fab-Fc Heavy Chain

SEQ ID NO: 27249 - protein, 125 aa, Artificial Sequence; identical to SEQ ID NO: 26293
  Description of Artificial Sequence: Synthetic polypeptide
  VH of XENP022440

SEQ ID NO: 27250 - protein, 5 aa, Artificial Sequence
  Description of Artificial Sequence: Synthetic peptide
  XENP022440 vhCDR1
GYYMH

SEQ ID NO: 27251 - protein, 17 aa, Artificial Sequence
  Description of Artificial Sequence: Synthetic peptide
  XENP022440 vhCDR2
WINPHSGGTNYAQKFQG

SEQ ID NO: 27252 - protein, 16 aa, Artificial Sequence
  Description of Artificial Sequence: Synthetic peptide
  XENP022440 vhCDR3
TYYYDSSGYYHDAFDI

SEQ ID NO: 27253 - protein, 231 aa, Artificial Sequence; identical to SEQ ID NO: 27198
  Description of Artificial Sequence: Synthetic polypeptide
  XENP022440 [ICOS]_H0_L0.7 one-arm mAb Fc-only Heavy Chain

SEQ ID NO: 27254 - protein, 214 aa, Artificial Sequence; identical to SEQ ID NO: 26477
  Description of Artificial Sequence: Synthetic polypeptide
  XENP022440 [ICOS]_H0_L0.7 one-arm mAb Light Chain

SEQ ID NO: 27255 - protein, 107 aa, Artificial Sequence; identical to SEQ ID NO: 26478
  Description of Artificial Sequence: Synthetic polypeptide
  VL of XENP022440

SEQ ID NO: 27256 - protein, 11 aa, Artificial Sequence
  Description of Artificial Sequence: Synthetic peptide
  XENP022440 vlCDR1
RASQGISSYLA

SEQ ID NO: 27257 - protein, 7 aa, Artificial Sequence
  Description of Artificial Sequence: Synthetic peptide
  XENP022440 vlCDR2
VASSLQS

SEQ ID NO: 27258 - protein, 9 aa, Artificial Sequence
  Description of Artificial Sequence: Synthetic peptide
  XENP022440 vlCDR3
QQANSFPWT

SEQ ID NO: 27259 - protein, 454 aa, Artificial Sequence; identical to SEQ ID NO: 26442
  Description of Artificial Sequence: Synthetic polypeptide
  XENP022441 [ICOS]_H0_L0.9 one-arm mAb Fab-Fc Heavy Chain

SEQ ID NO: 27260 - protein, 125 aa, Artificial Sequence; identical to SEQ ID NO: 26293
  Description of Artificial Sequence: Synthetic polypeptide
  VH of XENP022441

SEQ ID NO: 27261 - protein, 5 aa, Artificial Sequence
  Description of Artificial Sequence: Synthetic peptide
  XENP022441 vhCDR1
GYYMH

SEQ ID NO: 27262 - protein, 17 aa, Artificial Sequence
  Description of Artificial Sequence: Synthetic peptide
  XENP022441 vhCDR2
WINPHSGGTNYAQKFQG

SEQ ID NO: 27263 - protein, 16 aa, Artificial Sequence
  Description of Artificial Sequence: Synthetic peptide
  XENP022441 vhCDR3
TYYYDSSGYYHDAFDI

SEQ ID NO: 27264 - protein, 231 aa, Artificial Sequence; identical to SEQ ID NO: 27198
  Description of Artificial Sequence: Synthetic polypeptide
  XENP022441 [ICOS]_H0_L0.9 one-arm mAb Fc-only Heavy Chain

SEQ ID NO: 27265 - protein, 214 aa, Artificial Sequence
  Description of Artificial Sequence: Synthetic polypeptide
  XENP022441 [ICOS]_H0_L0.9 one-arm mAb Light Chain
DIQMTQSPSSVSASVGDRVTITCRASQGISRYLAWYQQKPGKAPKLLIYVASSLQSGVPSRFSGSGSGTDFTLTISSLQPEDFATYYCQQANSFPWTFGQGTKVEIKRTVAAPSVFIFPPSDEQLKSGTASVVCLLNNFYPREAKVQWKVDNALQSGNSQESVTEQDSKDSTYSLSSTLTLSKADYEKHKVYACEVTHQGLSSPVTKSFNRGEC

SEQ ID NO: 27266 - protein, 107 aa, Artificial Sequence
  Description of Artificial Sequence: Synthetic polypeptide
  VL of XENP022441
DIQMTQSPSSVSASVGDRVTITCRASQGISRYLAWYQQKPGKAPKLLIYVASSLQSGVPSRFSGSGSGTDFTLTISSLQPEDFATYYCQQANSFPWTFGQGTKVEIK

SEQ ID NO: 27267 - protein, 11 aa, Artificial Sequence
  Description of Artificial Sequence: Synthetic peptide
  XENP022441 vlCDR1
RASQGISRYLA

SEQ ID NO: 27268 - protein, 7 aa, Artificial Sequence
  Description of Artificial Sequence: Synthetic peptide
  XENP022441 vlCDR2
VASSLQS

SEQ ID NO: 27269 - protein, 9 aa, Artificial Sequence
  Description of Artificial Sequence: Synthetic peptide
  XENP022441 vlCDR3
QQANSFPWT

SEQ ID NO: 27270 - protein, 454 aa, Artificial Sequence; identical to SEQ ID NO: 26442
  Description of Artificial Sequence: Synthetic polypeptide
  XENP022442 [ICOS]_H0_L0.10 one-arm mAb Fab-Fc Heavy Chain

SEQ ID NO: 27271 - protein, 125 aa, Artificial Sequence; identical to SEQ ID NO: 26293
  Description of Artificial Sequence: Synthetic polypeptide
  VH of XENP022442

SEQ ID NO: 27272 - protein, 5 aa, Artificial Sequence
  Description of Artificial Sequence: Synthetic peptide
  XENP022442 vhCDR1
GYYMH

SEQ ID NO: 27273 - protein, 17 aa, Artificial Sequence
  Description of Artificial Sequence: Synthetic peptide
  XENP022442 vhCDR2
WINPHSGGTNYAQKFQG

SEQ ID NO: 27274 - protein, 16 aa, Artificial Sequence
  Description of Artificial Sequence: Synthetic peptide
  XENP022442 vhCDR3
TYYYDSSGYYHDAFDI

SEQ ID NO: 27275 - protein, 231 aa, Artificial Sequence; identical to SEQ ID NO: 27198
  Description of Artificial Sequence: Synthetic polypeptide
  XENP022442 [ICOS]_H0_L0.10 one-arm mAb Fc-only Heavy Chain

SEQ ID NO: 27276 - protein, 214 aa, Artificial Sequence
  Description of Artificial Sequence: Synthetic polypeptide
  XENP022442 [ICOS]_H0_L0.10 one-arm mAb Light Chain
DIQMTQSPSSVSASVGDRVTITCRASQGISRLLAWYQQKPGKAPKLLIYAASSLQSGVPSRFSGSGSGTDFTLTISSLQPEDFATYYCQQANSFPWTFGQGTKVEIKRTVAAPSVFIFPPSDEQLKSGTASVVCLLNNFYPREAKVQWKVDNALQSGNSQESVTEQDSKDSTYSLSSTLTLSKADYEKHKVYACEVTHQGLSSPVTKSFNRGEC

SEQ ID NO: 27277 - protein, 107 aa, Artificial Sequence
  Description of Artificial Sequence: Synthetic polypeptide
  VL of XENP022442
DIQMTQSPSSVSASVGDRVTITCRASQGISRLLAWYQQKPGKAPKLLIYAASSLQSGVPSRFSGSGSGTDFTLTISSLQPEDFATYYCQQANSFPWTFGQGTKVEIK

SEQ ID NO: 27278 - protein, 11 aa, Artificial Sequence
  Description of Artificial Sequence: Synthetic peptide
  XENP022442 vlCDR1
RASQGISRLLA

SEQ ID NO: 27279 - protein, 7 aa, Artificial Sequence
  Description of Artificial Sequence: Synthetic peptide
  XENP022442 vlCDR2
AASSLQS

SEQ ID NO: 27280 - protein, 9 aa, Artificial Sequence
  Description of Artificial Sequence: Synthetic peptide
  XENP022442 vlCDR3
QQANSFPWT

SEQ ID NO: 27281 - protein, 454 aa, Artificial Sequence; identical to SEQ ID NO: 26442
  Description of Artificial Sequence: Synthetic polypeptide
  XENP022443 [ICOS]_H0_L0.14 one-arm mAb Fab-Fc Heavy Chain

SEQ ID NO: 27282 - protein, 125 aa, Artificial Sequence; identical to SEQ ID NO: 26293
  Description of Artificial Sequence: Synthetic polypeptide
  VH of XENP022443

SEQ ID NO: 27283 - protein, 5 aa, Artificial Sequence
  Description of Artificial Sequence: Synthetic peptide
  XENP022443 vhCDR1
GYYMH

SEQ ID NO: 27284 - protein, 17 aa, Artificial Sequence
  Description of Artificial Sequence: Synthetic peptide
  XENP022443 vhCDR2
WINPHSGGTNYAQKFQG

SEQ ID NO: 27285 - protein, 16 aa, Artificial Sequence
  Description of Artificial Sequence: Synthetic peptide
  XENP022443 vhCDR3
TYYYDSSGYYHDAFDI

SEQ ID NO: 27286 - protein, 231 aa, Artificial Sequence; identical to SEQ ID NO: 27198
  Description of Artificial Sequence: Synthetic polypeptide
  XENP022443 [ICOS]_H0_L0.14 one-arm mAb Fc-only Heavy Chain

SEQ ID NO: 27287 - protein, 214 aa, Artificial Sequence
  Description of Artificial Sequence: Synthetic polypeptide
  XENP022443 [ICOS]_H0_L0.14 one-arm mAb Light Chain
DIQMTQSPSSVSASVGDRVTITCRASQGISRLLAWYQQKPGKAPKLLIYVASSLQSGVPSRFSGSGSGTDFTLTISSLQPEDFATYYCQQSNSFPWTFGQGTKVEIKRTVAAPSVFIFPPSDEQLKSGTASVVCLLNNFYPREAKVQWKVDNALQSGNSQESVTEQDSKDSTYSLSSTLTLSKADYEKHKVYACEVTHQGLSSPVTKSFNRGEC

SEQ ID NO: 27288 - protein, 107 aa, Artificial Sequence
  Description of Artificial Sequence: Synthetic polypeptide
  VL of XENP022443
DIQMTQSPSSVSASVGDRVTITCRASQGISRLLAWYQQKPGKAPKLLIYVASSLQSGVPSRFSGSGSGTDFTLTISSLQPEDFATYYCQQSNSFPWTFGQGTKVEIK

SEQ ID NO: 27289 - protein, 11 aa, Artificial Sequence
  Description of Artificial Sequence: Synthetic peptide
  XENP022443 vlCDR1
RASQGISRLLA

SEQ ID NO: 27290 - protein, 7 aa, Artificial Sequence
  Description of Artificial Sequence: Synthetic peptide
  XENP022443 vlCDR2
VASSLQS

SEQ ID NO: 27291 - protein, 9 aa, Artificial Sequence
  Description of Artificial Sequence: Synthetic peptide
  XENP022443 vlCDR3
QQSNSFPWT

SEQ ID NO: 27292 - protein, 454 aa, Artificial Sequence; identical to SEQ ID NO: 26442
  Description of Artificial Sequence: Synthetic polypeptide
  XENP022444 [ICOS]_H0_L0.15 one-arm mAb Fab-Fc Heavy Chain

SEQ ID NO: 27293 - protein, 125 aa, Artificial Sequence; identical to SEQ ID NO: 26293
  Description of Artificial Sequence: Synthetic polypeptide
  VH of XENP022444

SEQ ID NO: 27294 - protein, 5 aa, Artificial Sequence
  Description of Artificial Sequence: Synthetic peptide
  XENP022444 vhCDR1
GYYMH

SEQ ID NO: 27295 - protein, 17 aa, Artificial Sequence
  Description of Artificial Sequence: Synthetic peptide
  XENP022444 vhCDR2
WINPHSGGTNYAQKFQG

SEQ ID NO: 27296 - protein, 16 aa, Artificial Sequence
  Description of Artificial Sequence: Synthetic peptide
  XENP022444 vhCDR3
TYYYDSSGYYHDAFDI

SEQ ID NO: 27297 - protein, 231 aa, Artificial Sequence; identical to SEQ ID NO: 27198
  Description of Artificial Sequence: Synthetic polypeptide
  XENP022444 [ICOS]_H0_L0.15 one-arm mAb Fc-only Heavy Chain

SEQ ID NO: 27298 - protein, 214 aa, Artificial Sequence
  Description of Artificial Sequence: Synthetic polypeptide
  XENP022444 [ICOS]_H0_L0.15 one-arm mAb Light Chain
DIQMTQSPSSVSASVGDRVTITCRASQGISRLLAWYQQKPGKAPKLLIYVASSLQSGVPSRFSGSGSGTDFTLTISSLQPEDFATYYCQQAESFPWTFGQGTKVEIKRTVAAPSVFIFPPSDEQLKSGTASVVCLLNNFYPREAKVQWKVDNALQSGNSQESVTEQDSKDSTYSLSSTLTLSKADYEKHKVYACEVTHQGLSSPVTKSFNRGEC

SEQ ID NO: 27299 - protein, 107 aa, Artificial Sequence
  Description of Artificial Sequence: Synthetic polypeptide
  VL of XENP022444
DIQMTQSPSSVSASVGDRVTITCRASQGISRLLAWYQQKPGKAPKLLIYVASSLQSGVPSRFSGSGSGTDFTLTISSLQPEDFATYYCQQAESFPWTFGQGTKVEIK

SEQ ID NO: 27300 - protein, 11 aa, Artificial Sequence
  Description of Artificial Sequence: Synthetic peptide
  XENP022444 vlCDR1
RASQGISRLLA

SEQ ID NO: 27301 - protein, 7 aa, Artificial Sequence
  Description of Artificial Sequence: Synthetic peptide
  XENP022444 vlCDR2
VASSLQS

SEQ ID NO: 27302 - protein, 9 aa, Artificial Sequence
  Description of Artificial Sequence: Synthetic peptide
  XENP022444 vlCDR3
QQAESFPWT

SEQ ID NO: 27303 - protein, 454 aa, Artificial Sequence; identical to SEQ ID NO: 26442
  Description of Artificial Sequence: Synthetic polypeptide
  XENP022445 [ICOS]_H0_L0.20 one-arm mAb Fab-Fc Heavy Chain

SEQ ID NO: 27304 - protein, 125 aa, Artificial Sequence; identical to SEQ ID NO: 26293
  Description of Artificial Sequence: Synthetic polypeptide
  VH of XENP022445

SEQ ID NO: 27305 - protein, 5 aa, Artificial Sequence
  Description of Artificial Sequence: Synthetic peptide
  XENP022445 vhCDR1
GYYMH

SEQ ID NO: 27306 - protein, 17 aa, Artificial Sequence
  Description of Artificial Sequence: Synthetic peptide
  XENP022445 vhCDR2
WINPHSGGTNYAQKFQG

SEQ ID NO: 27307 - protein, 16 aa, Artificial Sequence
  Description of Artificial Sequence: Synthetic peptide
  XENP022445 vhCDR3
TYYYDSSGYYHDAFDI

SEQ ID NO: 27308 - protein, 231 aa, Artificial Sequence; identical to SEQ ID NO: 27198
  Description of Artificial Sequence: Synthetic polypeptide
  XENP022445 [ICOS]_H0_L0.20 one-arm mAb Fc-only Heavy Chain

SEQ ID NO: 27309 - protein, 214 aa, Artificial Sequence
  Description of Artificial Sequence: Synthetic polypeptide
  XENP022445 [ICOS]_H0_L0.20 one-arm mAb Light Chain
DIQMTQSPSSVSASVGDRVTITCRASQGISRLLAWYQQKPGKAPKLLIYVASSLQSGVPSRFSGSGSGTDFTLTISSLQPEDFATYYCQQANSYPWTFGQGTKVEIKRTVAAPSVFIFPPSDEQLKSGTASVVCLLNNFYPREAKVQWKVDNALQSGNSQESVTEQDSKDSTYSLSSTLTLSKADYEKHKVYACEVTHQGLSSPVTKSFNRGEC

SEQ ID NO: 27310 - protein, 107 aa, Artificial Sequence
  Description of Artificial Sequence: Synthetic polypeptide
  VL of XENP022445
DIQMTQSPSSVSASVGDRVTITCRASQGISRLLAWYQQKPGKAPKLLIYVASSLQSGVPSRFSGSGSGTDFTLTISSLQPEDFATYYCQQANSYPWTFGQGTKVEIK

SEQ ID NO: 27311 - protein, 11 aa, Artificial Sequence
  Description of Artificial Sequence: Synthetic peptide
  XENP022445 vlCDR1
RASQGISRLLA

SEQ ID NO: 27312 - protein, 7 aa, Artificial Sequence
  Description of Artificial Sequence: Synthetic peptide
  XENP022445 vlCDR2
VASSLQS

SEQ ID NO: 27313 - protein, 9 aa, Artificial Sequence
  Description of Artificial Sequence: Synthetic peptide
  XENP022445 vlCDR3
QQANSYPWT

SEQ ID NO: 27314 - protein, 454 aa, Artificial Sequence; identical to SEQ ID NO: 26442
  Description of Artificial Sequence: Synthetic polypeptide
  XENP022766 [ICOS]_H0_L0.38 one-arm mAb Fab-Fc Heavy Chain

SEQ ID NO: 27315 - protein, 125 aa, Artificial Sequence; identical to SEQ ID NO: 26293
  Description of Artificial Sequence: Synthetic polypeptide
  VH of XENP022766

SEQ ID NO: 27316 - protein, 5 aa, Artificial Sequence
  Description of Artificial Sequence: Synthetic peptide
  XENP022766 vhCDR1
GYYMH

SEQ ID NO: 27317 - protein, 17 aa, Artificial Sequence
  Description of Artificial Sequence: Synthetic peptide
  XENP022766 vhCDR2
WINPHSGGTNYAQKFQG

SEQ ID NO: 27318 - protein, 16 aa, Artificial Sequence
  Description of Artificial Sequence: Synthetic peptide
  XENP022766 vhCDR3
TYYYDSSGYYHDAFDI

SEQ ID NO: 27319 - protein, 231 aa, Artificial Sequence; identical to SEQ ID NO: 27198
  Description of Artificial Sequence: Synthetic polypeptide
  XENP022766 [ICOS]_H0_L0.38 one-arm mAb Fc-only Heavy Chain

SEQ ID NO: 27320 - protein, 214 aa, Artificial Sequence; identical to SEQ ID NO: 26557
  Description of Artificial Sequence: Synthetic polypeptide
  XENP022766 [ICOS]_H0_L0.38 one-arm mAb Light Chain

SEQ ID NO: 27321 - protein, 107 aa, Artificial Sequence; identical to SEQ ID NO: 26558
  Description of Artificial Sequence: Synthetic polypeptide
  VL of XENP022766

SEQ ID NO: 27322 - protein, 11 aa, Artificial Sequence
  Description of Artificial Sequence: Synthetic peptide
  XENP022766 vlCDR1
QASQDISSLLA

SEQ ID NO: 27323 - protein, 7 aa, Artificial Sequence
  Description of Artificial Sequence: Synthetic peptide
  XENP022766 vlCDR2
AASSLQS

SEQ ID NO: 27324 - protein, 9 aa, Artificial Sequence
  Description of Artificial Sequence: Synthetic peptide
  XENP022766 vlCDR3
QQAESFPWT

SEQ ID NO: 27325 - protein, 454 aa, Artificial Sequence; identical to SEQ ID NO: 26562
  Description of Artificial Sequence: Synthetic polypeptide
  XENP023096 [ICOS]_H0.66_L0 one-arm mAb Fab-Fc Heavy Chain

SEQ ID NO: 27326 - protein, 125 aa, Artificial Sequence; identical to SEQ ID NO: 26563
  Description of Artificial Sequence: Synthetic polypeptide
  VH of XENP023096

SEQ ID NO: 27327 - protein, 5 aa, Artificial Sequence
  Description of Artificial Sequence: Synthetic peptide
  XENP023096 vhCDR1
GYYMH

SEQ ID NO: 27328 - protein, 17 aa, Artificial Sequence
  Description of Artificial Sequence: Synthetic peptide
  XENP023096 vhCDR2
WINPHSGETIYAQKFQG

SEQ ID NO: 27329 - protein, 16 aa, Artificial Sequence
  Description of Artificial Sequence: Synthetic peptide
  XENP023096 vhCDR3
TYYYDTSGYYHDAFDV

SEQ ID NO: 27330 - protein, 231 aa, Artificial Sequence; identical to SEQ ID NO: 27198
  Description of Artificial Sequence: Synthetic polypeptide
  XENP023096 [ICOS]_H0.66_L0 one-arm mAb Fc-only Heavy Chain

SEQ ID NO: 27331 - protein, 214 aa, Artificial Sequence; identical to SEQ ID NO: 26297
  Description of Artificial Sequence: Synthetic polypeptide
  XENP023096 [ICOS]_H0.66_L0 one-arm mAb Light Chain

SEQ ID NO: 27332 - protein, 107 aa, Artificial Sequence; identical to SEQ ID NO: 26298
  Description of Artificial Sequence: Synthetic polypeptide
  VL of XENP023096

SEQ ID NO: 27333 - protein, 11 aa, Artificial Sequence
  Description of Artificial Sequence: Synthetic peptide
  XENP023096 vlCDR1
RASQGISRLLA

SEQ ID NO: 27334 - protein, 7 aa, Artificial Sequence
  Description of Artificial Sequence: Synthetic peptide
  XENP023096 vlCDR2
VASSLQS

SEQ ID NO: 27335 - protein, 9 aa, Artificial Sequence
  Description of Artificial Sequence: Synthetic peptide
  XENP023096 vlCDR3
QQANSFPWT

SEQ ID NO: 27336 - protein, 447 aa, Artificial Sequence; identical to SEQ ID NO: 26382
  Description of Artificial Sequence: Synthetic polypeptide
  XENP023377 11D4[OX40]_H0L0 _Fab-1G6_L1.194_H1.279_scFv Fab-Fc Heavy Chain

SEQ ID NO: 27337 - protein, 118 aa, Artificial Sequence; identical to SEQ ID NO: 26273
  Description of Artificial Sequence: Synthetic polypeptide
  VH of XENP023377

SEQ ID NO: 27338 - protein, 5 aa, Artificial Sequence
  Description of Artificial Sequence: Synthetic peptide
  XENP023377 vhCDR1
SYSMN

SEQ ID NO: 27339 - protein, 11 aa, Artificial Sequence
  Description of Artificial Sequence: Synthetic peptide
  XENP023377 vhCDR2
YISSSSSTIDY

SEQ ID NO: 27340 - protein, 9 aa, Artificial Sequence
  Description of Artificial Sequence: Synthetic peptide
  XENP023377 vhCDR3
ESGWYLFDY

SEQ ID NO: 27341 - protein, 480 aa, Artificial Sequence; identical to SEQ ID NO: 2870
  Description of Artificial Sequence: Synthetic polypeptide
  XENP023377 11D4[OX40]_H0L0 _Fab-1G6_L1.194_H1.279_scFv scFv-Fc Heavy Chain

SEQ ID NO: 27342 - protein, 107 aa, Artificial Sequence; identical to SEQ ID NO: 2871
  Description of Artificial Sequence: Synthetic polypeptide
  VH of XENP023377

SEQ ID NO: 27343 - protein, 122 aa, Artificial Sequence; identical to SEQ ID NO: 2872
  Description of Artificial Sequence: Synthetic polypeptide
  VL of XENP023377

SEQ ID NO: 27344 - protein, 231 aa, Artificial Sequence; identical to SEQ ID NO: 2397
  Description of Artificial Sequence: Synthetic polypeptide
  Fc chain of XENP023377

SEQ ID NO: 27345 - protein, 11 aa, Artificial Sequence
  Description of Artificial Sequence: Synthetic peptide
  XENP023377 vhCDR1
RASQSVGNDVA

SEQ ID NO: 27346 - protein, 7 aa, Artificial Sequence
  Description of Artificial Sequence: Synthetic peptide
  XENP023377 vhCDR2
YASHRYT

SEQ ID NO: 27347 - protein, 9 aa, Artificial Sequence
  Description of Artificial Sequence: Synthetic peptide
  XENP023377 vhCDR3
QQDFSSPRT

SEQ ID NO: 27348 - protein, 5 aa, Artificial Sequence
  Description of Artificial Sequence: Synthetic peptide
  XENP023377 vlCDR1
NYWMN

SEQ ID NO: 27349 - protein, 19 aa, Artificial Sequence
  Description of Artificial Sequence: Synthetic peptide
  XENP023377 vlCDR2
EIRLYSNNYATHYAESVKG

SEQ ID NO: 27350 - protein, 11 aa, Artificial Sequence
  Description of Artificial Sequence: Synthetic peptide
  XENP023377 vlCDR3
YYGNYGGYFDV

SEQ ID NO: 27351 - protein, 214 aa, Artificial Sequence; identical to SEQ ID NO: 26277
  Description of Artificial Sequence: Synthetic polypeptide
  XENP023377 11D4[OX40]_H0L0 _Fab-1G6_L1.194_H1.279_scFv Light Chain

SEQ ID NO: 27352 - protein, 107 aa, Artificial Sequence; identical to SEQ ID NO: 26278
  Description of Artificial Sequence: Synthetic polypeptide
  VL of XENP023377

SEQ ID NO: 27353 - protein, 11 aa, Artificial Sequence
  Description of Artificial Sequence: Synthetic peptide
  XENP023377 vlCDR1
RASQGISSWLA

SEQ ID NO: 27354 - protein, 7 aa, Artificial Sequence
  Description of Artificial Sequence: Synthetic peptide
  XENP023377 vlCDR2
AASSLQS

SEQ ID NO: 27355 - protein, 9 aa, Artificial Sequence
  Description of Artificial Sequence: Synthetic peptide
  XENP023377 vlCDR3
QQYNSYPPT

SEQ ID NO: 27356 - protein, 451 aa, Artificial Sequence; identical to SEQ ID NO: 26402
  Description of Artificial Sequence: Synthetic polypeptide
  XENP023378 1D8[GITR]_H0L0 _Fab-1G6_L1.194_H1.279_scFv Fab-Fc Heavy Chain

SEQ ID NO: 27357 - protein, 122 aa, Artificial Sequence; identical to SEQ ID NO: 26283
  Description of Artificial Sequence: Synthetic polypeptide
  VH of XENP023378

SEQ ID NO: 27358 - protein, 7 aa, Artificial Sequence
  Description of Artificial Sequence: Synthetic peptide
  XENP023378 vhCDR1
TSGMGVG

SEQ ID NO: 27359 - protein, 9 aa, Artificial Sequence
  Description of Artificial Sequence: Synthetic peptide
  XENP023378 vhCDR2
HIWWDDDKY

SEQ ID NO: 27360 - protein, 12 aa, Artificial Sequence
  Description of Artificial Sequence: Synthetic peptide
  XENP023378 vhCDR3
SYYYGSSGAMDY

SEQ ID NO: 27361 - protein, 480 aa, Artificial Sequence; identical to SEQ ID NO: 2870
  Description of Artificial Sequence: Synthetic polypeptide
  XENP023378 1D8[GITR]_H0L0 _Fab-1G6_L1.194_H1.279_scFv scFv-Fc Heavy Chain

SEQ ID NO: 27362 - protein, 107 aa, Artificial Sequence; identical to SEQ ID NO: 2871
  Description of Artificial Sequence: Synthetic polypeptide
  VH of XENP023378

SEQ ID NO: 27363 - protein, 122 aa, Artificial Sequence; identical to SEQ ID NO: 2872
  Description of Artificial Sequence: Synthetic polypeptide
  VL of XENP023378

SEQ ID NO: 27364 - protein, 231 aa, Artificial Sequence; identical to SEQ ID NO: 2397
  Description of Artificial Sequence: Synthetic polypeptide
  Fc chain of XENP023378

SEQ ID NO: 27365 - protein, 11 aa, Artificial Sequence
  Description of Artificial Sequence: Synthetic peptide
  XENP023378 vhCDR1
RASQSVGNDVA

SEQ ID NO: 27366 - protein, 7 aa, Artificial Sequence
  Description of Artificial Sequence: Synthetic peptide
  XENP023378 vhCDR2
YASHRYT

SEQ ID NO: 27367 - protein, 9 aa, Artificial Sequence
  Description of Artificial Sequence: Synthetic peptide
  XENP023378 vhCDR3
QQDFSSPRT

SEQ ID NO: 27368 - protein, 5 aa, Artificial Sequence
  Description of Artificial Sequence: Synthetic peptide
  XENP023378 vlCDR1
NYWMN

SEQ ID NO: 27369 - protein, 19 aa, Artificial Sequence
  Description of Artificial Sequence: Synthetic peptide
  XENP023378 vlCDR2
EIRLYSNNYATHYAESVKG

SEQ ID NO: 27370 - protein, 11 aa, Artificial Sequence
  Description of Artificial Sequence: Synthetic peptide
  XENP023378 vlCDR3
YYGNYGGYFDV

SEQ ID NO: 27371 - protein, 219 aa, Artificial Sequence; identical to SEQ ID NO: 26287
  Description of Artificial Sequence: Synthetic polypeptide
  XENP023378 1D8[GITR]_H0L0 _Fab-1G6_L1.194_H1.279_scFv Light Chain

SEQ ID NO: 27372 - protein, 112 aa, Artificial Sequence; identical to SEQ ID NO: 26288
  Description of Artificial Sequence: Synthetic polypeptide
  VL of XENP023378

SEQ ID NO: 27373 - protein, 16 aa, Artificial Sequence
  Description of Artificial Sequence: Synthetic peptide
  XENP023378 vlCDR1
RSSQSLVHSDGNTYLH

SEQ ID NO: 27374 - protein, 6 aa, Artificial Sequence
  Description of Artificial Sequence: Synthetic peptide
  XENP023378 vlCDR2
KVSKRF

SEQ ID NO: 27375 - protein, 9 aa, Artificial Sequence
  Description of Artificial Sequence: Synthetic peptide
  XENP023378 vlCDR3
SQSTHVPPT

SEQ ID NO: 27376 - protein, 450 aa, Artificial Sequence; identical to SEQ ID NO: 26422
  Description of Artificial Sequence: Synthetic polypeptide
  XENP023379 20H4.9[4-1BB]_H0L0 _Fab-1G6_L1.194_H1.279_scFv Fab-Fc Heavy Chain

SEQ ID NO: 27377 - protein, 121 aa, Artificial Sequence [sequence omitted]

SEQ ID NO: 27378 - protein, 5 aa, Artificial Sequence
  Description of Artificial Sequence: Synthetic peptide
  XENP023379 vhCDR1
GYYWS

SEQ ID NO: 27379 - protein, 11 aa, Artificial Sequence
  Description of Artificial Sequence: Synthetic peptide
  XENP023379 vhCDR2
EINHGGYVTYN

SEQ ID NO: 27380 - protein, 13 aa, Artificial Sequence
  Description of Artificial Sequence: Synthetic peptide
  XENP023379 vhCDR3
DYGPGNYDWYFDL

SEQ ID NO: 27381 - protein, 480 aa, Artificial Sequence; identical to SEQ ID NO: 2870
  Description of Artificial Sequence: Synthetic polypeptide
  XENP023379 20H4.9[4-1BB]_H0L0 _Fab-1G6_L1.194_H1.279_scFv scFv-Fc Heavy Chain

SEQ ID NO: 27382 - protein, 107 aa, Artificial Sequence; identical to SEQ ID NO: 2871
  Description of Artificial Sequence: Synthetic polypeptide
  VH of XENP023379

SEQ ID NO: 27383 - protein, 122 aa, Artificial Sequence; identical to SEQ ID NO: 2872
  Description of Artificial Sequence: Synthetic polypeptide
  VL of XENP023379

SEQ ID NO: 27384 - protein, 231 aa, Artificial Sequence; identical to SEQ ID NO: 2397
  Description of Artificial Sequence: Synthetic polypeptide
  Fc chain of XENP023379

SEQ ID NO: 27385 - protein, 11 aa, Artificial Sequence
  Description of Artificial Sequence: Synthetic peptide
  XENP023379 vhCDR1
RASQSVGNDVA

SEQ ID NO: 27386 - protein, 7 aa, Artificial Sequence
  Description of Artificial Sequence: Synthetic peptide
  XENP023379 vhCDR2
YASHRYT

SEQ ID NO: 27387 - protein, 9 aa, Artificial Sequence
  Description of Artificial Sequence: Synthetic peptide
  XENP023379 vhCDR3
QQDFSSPRT

SEQ ID NO: 27388 - protein, 5 aa, Artificial Sequence
  Description of Artificial Sequence: Synthetic peptide
  XENP023379 vlCDR1
NYWMN

SEQ ID NO: 27389 - protein, 19 aa, Artificial Sequence
  Description of Artificial Sequence: Synthetic peptide
  XENP023379 vlCDR2
EIRLYSNNYATHYAESVKG

SEQ ID NO: 27390 - protein, 11 aa, Artificial Sequence
  Description of Artificial Sequence: Synthetic peptide
  XENP023379 vlCDR3
YYGNYGGYFDV

SEQ ID NO: 27391 - protein, 216 aa, Artificial Sequence; identical to SEQ ID NO: 26267
  Description of Artificial Sequence: Synthetic polypeptide
  XENP023379 20H4.9[4-1BB]_H0L0 _Fab-1G6_L1.194_H1.279_scFv Light Chain

SEQ ID NO: 27392 - protein, 109 aa, Artificial Sequence [sequence omitted]

SEQ ID NO: 27393 - protein, 11 aa, Artificial Sequence
  Description of Artificial Sequence: Synthetic peptide
  XENP023379 vlCDR1
RASQSVSSYLA

SEQ ID NO: 27394 - protein, 7 aa, Artificial Sequence
  Description of Artificial Sequence: Synthetic peptide
  XENP023379 vlCDR2
DASNRAT

SEQ ID NO: 27395 - protein, 11 aa, Artificial Sequence
  Description of Artificial Sequence: Synthetic peptide
  XENP023379 vlCDR3
QQRSNWPPALT

SEQ ID NO: 27396 - protein, 447 aa, Artificial Sequence
  Description of Artificial Sequence: Synthetic polypeptide
  XENP019192 ipilimumab[CTLA-4]_H0L0 _Fab-[anti-ICOS]-H0L0_scFv Fab-Fc Heavy Chain
QVQLVESGGGVVQPGRSLRLSCAASGFTFSSYTMHWVRQAPGKGLEWVTFISYDGNNKYYADSVKGRFTISRDNSKNTLYLQMNSLRAEDTAIYYCARTGWLGPFDYWGQGTLVTVSSASTKGPSVFPLAPSSKSTSGGTAALGCLVKDYFPEPVTVSWNSGALTSGVHTFPAVLQSSGLYSLSSVVTVPSSSLGTQTYICNVNHKPSDTKVDKKVEPKSCDKTHTCPPCPAPPVAGPSVFLFPPKPKDTLMISRTPEVTCVVVDVKHEDPEVKFNWYVDGVEVHNAKTKPREEEYNSTYRVVSVLTVLHQDWLNGKEYKCKVSNKALPAPIEKTISKAKGQPREPQVYTLPPSREEMTKNQVSLTCDVSGFYPSDIAVEWESDGQPENNYKTTPPVLDSDGSFFLYSKLTVDKSRWEQGDVFSCSVMHEALHNHYTQKSLSLSPGK

SEQ ID NO: 27397 - protein, 118 aa, Artificial Sequence; identical to SEQ ID NO: 3737
  Description of Artificial Sequence: Synthetic polypeptide
  VH of XENP019192

SEQ ID NO: 27398 - protein, 5 aa, Artificial Sequence
  Description of Artificial Sequence: Synthetic peptide
  XENP019192 vhCDR1
SYTMH

SEQ ID NO: 27399 - protein, 17 aa, Artificial Sequence
  Description of Artificial Sequence: Synthetic peptide
  XENP019192 vhCDR2
FISYDGNNKYYADSVKG

SEQ ID NO: 27400 - protein, 9 aa, Artificial Sequence
  Description of Artificial Sequence: Synthetic peptide
  XENP019192 vhCDR3
TGWLGPFDY

SEQ ID NO: 27401 - protein, 483 aa, Artificial Sequence; identical to SEQ ID NO: 26827
  Description of Artificial Sequence: Synthetic polypeptide
  XENP019192 ipilimumab[CTLA-4]_H0L0 _Fab-[anti-ICOS]-H0L0_scFv scFv-Fc Heavy Chain

SEQ ID NO: 27402 - protein, 125 aa, Artificial Sequence; identical to SEQ ID NO: 26293
  Description of Artificial Sequence: Synthetic polypeptide
  VH of XENP019192

SEQ ID NO: 27403 - protein, 107 aa, Artificial Sequence; identical to SEQ ID NO: 26298
  Description of Artificial Sequence: Synthetic polypeptide
  VL of XENP019192

SEQ ID NO: 27404 - protein, 231 aa, Artificial Sequence; identical to SEQ ID NO: 2397
  Description of Artificial Sequence: Synthetic polypeptide
  Fc chain of XENP019192

SEQ ID NO: 27405 - protein, 5 aa, Artificial Sequence
  Description of Artificial Sequence: Synthetic peptide
  XENP019192 vhCDR1
GYYMH

SEQ ID NO: 27406 - protein, 17 aa, Artificial Sequence
  Description of Artificial Sequence: Synthetic peptide
  XENP019192 vhCDR2
WINPHSGGTNYAQKFQG

SEQ ID NO: 27407 - protein, 16 aa, Artificial Sequence
  Description of Artificial Sequence: Synthetic peptide
  XENP019192 vhCDR3
TYYYDSSGYYHDAFDI

SEQ ID NO: 27408 - protein, 11 aa, Artificial Sequence
  Description of Artificial Sequence: Synthetic peptide
  XENP019192 vlCDR1
RASQGISRLLA

SEQ ID NO: 27409 - protein, 7 aa, Artificial Sequence
  Description of Artificial Sequence: Synthetic peptide
  XENP019192 vlCDR2
VASSLQS

SEQ ID NO: 27410 - protein, 9 aa, Artificial Sequence
  Description of Artificial Sequence: Synthetic peptide
  XENP019192 vlCDR3
QQANSFPWT

SEQ ID NO: 27411 - protein, 215 aa, Artificial Sequence; identical to SEQ ID NO: 7600
  Description of Artificial Sequence: Synthetic polypeptide
  XENP019192 ipilimumab[CTLA-4]_H0L0 _Fab-[anti-ICOS]-H0L0_scFv Light Chain

SEQ ID NO: 27412 - protein, 108 aa, Artificial Sequence; identical to SEQ ID NO: 3741
  Description of Artificial Sequence: Synthetic polypeptide
  VL of XENP019192

SEQ ID NO: 27413 - protein, 12 aa, Artificial Sequence
  Description of Artificial Sequence: Synthetic peptide
  XENP019192 vlCDR1
RASQSVGSSYLA

SEQ ID NO: 27414 - protein, 7 aa, Artificial Sequence
  Description of Artificial Sequence: Synthetic peptide
  XENP019192 vlCDR2
GAFSRAT

SEQ ID NO: 27415 - protein, 9 aa, Artificial Sequence
  Description of Artificial Sequence: Synthetic peptide
  XENP019192 vlCDR3
QQYGSSPWT

SEQ ID NO: 27416 - protein, 450 aa, Artificial Sequence; identical to SEQ ID NO: 26262
  Description of Artificial Sequence: Synthetic polypeptide
  XENP014410 20H4.9[4-1BB]_H0L0_IgG1_PVA_/S267K Heavy Chain

SEQ ID NO: 27417 - protein, 121 aa, Artificial Sequence [sequence omitted]

SEQ ID NO: 27418 - protein, 5 aa, Artificial Sequence
  Description of Artificial Sequence: Synthetic peptide
  XENP014410 vhCDR1
GYYWS

SEQ ID NO: 27419 - protein, 16 aa, Artificial Sequence
  Description of Artificial Sequence: Synthetic peptide
  XENP014410 vhCDR2
EINHGGYVTYNPSLES

SEQ ID NO: 27420 - protein, 13 aa, Artificial Sequence
  Description of Artificial Sequence: Synthetic peptide
  XENP014410 vhCDR3
DYGPGNYDWYFDL

SEQ ID NO: 27421 - protein, 216 aa, Artificial Sequence; identical to SEQ ID NO: 26267
  Description of Artificial Sequence: Synthetic polypeptide
  XENP014410 20H4.9[4-1BB]_H0L0_IgG1_PVA_/S267K Light Chain

SEQ ID NO: 27422 - protein, 109 aa, Artificial Sequence [sequence omitted]

SEQ ID NO: 27423 - protein, 11 aa, Artificial Sequence
  Description of Artificial Sequence: Synthetic peptide
  XENP014410 vlCDR1
RASQSVSSYLA

SEQ ID NO: 27424 - protein, 7 aa, Artificial Sequence
  Description of Artificial Sequence: Synthetic peptide
  XENP014410 vlCDR2
DASNRAT

SEQ ID NO: 27425 - protein, 11 aa, Artificial Sequence
  Description of Artificial Sequence: Synthetic peptide
  XENP014410 vlCDR3
QQRSNWPPALT

SEQ ID NO: 27426 - protein, 447 aa, Artificial Sequence; identical to SEQ ID NO: 26272
  Description of Artificial Sequence: Synthetic polypeptide
  XENP016437 11D4[OX40]_H0L0_IgG1_PVA_/S267K Heavy Chain

SEQ ID NO: 27427 - protein, 118 aa, Artificial Sequence; identical to SEQ ID NO: 26273
  Description of Artificial Sequence: Synthetic polypeptide
  VH of XENP016437

SEQ ID NO: 27428 - protein, 5 aa, Artificial Sequence
  Description of Artificial Sequence: Synthetic peptide
  XENP016437 vhCDR1
SYSMN

SEQ ID NO: 27429 - protein, 17 aa, Artificial Sequence
  Description of Artificial Sequence: Synthetic peptide
  XENP016437 vhCDR2
YISSSSSTIDYADSVKG

SEQ ID NO: 27430 - protein, 9 aa, Artificial Sequence
  Description of Artificial Sequence: Synthetic peptide
  XENP016437 vhCDR3
ESGWYLFDY

SEQ ID NO: 27431 - protein, 214 aa, Artificial Sequence; identical to SEQ ID NO: 26277
  Description of Artificial Sequence: Synthetic polypeptide
  XENP016437 11D4[OX40]_H0L0_IgG1_PVA_/S267K Light Chain

SEQ ID NO: 27432 - protein, 107 aa, Artificial Sequence; identical to SEQ ID NO: 26278
  Description of Artificial Sequence: Synthetic polypeptide
  VL of XENP016437

SEQ ID NO: 27433 - protein, 11 aa, Artificial Sequence
  Description of Artificial Sequence: Synthetic peptide
  XENP016437 vlCDR1
RASQGISSWLA

SEQ ID NO: 27434 - protein, 7 aa, Artificial Sequence
  Description of Artificial Sequence: Synthetic peptide
  XENP016437 vlCDR2
AASSLQS

SEQ ID NO: 27435 - protein, 9 aa, Artificial Sequence
  Description of Artificial Sequence: Synthetic peptide
  XENP016437 vlCDR3
QQYNSYPPT

SEQ ID NO: 27436 - protein, 451 aa, Artificial Sequence; identical to SEQ ID NO: 26282
  Description of Artificial Sequence: Synthetic polypeptide
  XENP016438 1D8[GITR]_H0L0_IgG1_PVA_/S267K Heavy Chain

SEQ ID NO: 27437 - protein, 122 aa, Artificial Sequence; identical to SEQ ID NO: 26283
  Description of Artificial Sequence: Synthetic polypeptide
  VH of XENP016438

SEQ ID NO: 27438 - protein, 7 aa, Artificial Sequence
  Description of Artificial Sequence: Synthetic peptide
  XENP016438 vhCDR1
TSGMGVG

SEQ ID NO: 27439 - protein, 16 aa, Artificial Sequence
  Description of Artificial Sequence: Synthetic peptide
  XENP016438 vhCDR2
HIWWDDDKYYSPSLKS

SEQ ID NO: 27440 - protein, 12 aa, Artificial Sequence
  Description of Artificial Sequence: Synthetic peptide
  XENP016438 vhCDR3
SYYYGSSGAMDY

SEQ ID NO: 27441 - protein, 219 aa, Artificial Sequence; identical to SEQ ID NO: 26287
  Description of Artificial Sequence: Synthetic polypeptide
  XENP016438 1D8[GITR]_H0L0_IgG1_PVA_/S267K Light Chain

SEQ ID NO: 27442 - protein, 112 aa, Artificial Sequence; identical to SEQ ID NO: 26288
  Description of Artificial Sequence: Synthetic polypeptide
  VL of XENP016438

SEQ ID NO: 27443 - protein, 16 aa, Artificial Sequence
  Description of Artificial Sequence: Synthetic peptide
  XENP016438 vlCDR1
RSSQSLVHSDGNTYLH

SEQ ID NO: 27444 - protein, 7 aa, Artificial Sequence
  Description of Artificial Sequence: Synthetic peptide
  XENP016438 vlCDR2
KVSKRFS

SEQ ID NO: 27445 - protein, 9 aa, Artificial Sequence
  Description of Artificial Sequence: Synthetic peptide
  XENP016438 vlCDR3
SQSTHVPPT

SEQ ID NO: 27446 - protein, 452 aa, Artificial Sequence; identical to SEQ ID NO: 26302
  Description of Artificial Sequence: Synthetic polypeptide
  XENP021820 GSK_314.8[ICOS]_H0L0_IgG1_PVA_/S267K Heavy Chain

SEQ ID NO: 27447 - protein, 123 aa, Artificial Sequence; identical to SEQ ID NO: 26303
  Description of Artificial Sequence: Synthetic polypeptide
  VH of XENP021820

SEQ ID NO: 27448 - protein, 5 aa, Artificial Sequence
  Description of Artificial Sequence: Synthetic peptide
  XENP021820 vhCDR1
TYWMH

SEQ ID NO: 27449 - protein, 17 aa, Artificial Sequence
  Description of Artificial Sequence: Synthetic peptide
  XENP021820 vhCDR2
EIDPSDSYVNYNQNFKG

SEQ ID NO: 27450 - protein, 14 aa, Artificial Sequence
  Description of Artificial Sequence: Synthetic peptide
  XENP021820 vhCDR3
SPDYYGTSLAWFDY

SEQ ID NO: 27451 - protein, 219 aa, Artificial Sequence; identical to SEQ ID NO: 26307
  Description of Artificial Sequence: Synthetic polypeptide
  XENP021820 GSK_314.8[ICOS]_H0L0_IgG1_PVA_/S267K Light Chain

SEQ ID NO: 27452 - protein, 112 aa, Artificial Sequence; identical to SEQ ID NO: 26308
  Description of Artificial Sequence: Synthetic polypeptide
  VL of XENP021820

SEQ ID NO: 27453 - protein, 16 aa, Artificial Sequence
  Description of Artificial Sequence: Synthetic peptide
  XENP021820 vlCDR1
RSSKSPLHSNGNIYLY

SEQ ID NO: 27454 - protein, 7 aa, Artificial Sequence
  Description of Artificial Sequence: Synthetic peptide
  XENP021820 vlCDR2
RMSNLAS

SEQ ID NO: 27455 - protein, 9 aa, Artificial Sequence
  Description of Artificial Sequence: Synthetic peptide
  XENP021820 vlCDR3
MQHLEYPYT

SEQ ID NO: 27456 - protein, 453 aa, Artificial Sequence; identical to SEQ ID NO: 26312
  Description of Artificial Sequence: Synthetic polypeptide
  XENP021821 GSK_88.2[ICOS]_H0L0_IgG1_PVA_/S267K Heavy Chain

SEQ ID NO: 27457 - protein, 124 aa, Artificial Sequence; identical to SEQ ID NO: 26313
  Description of Artificial Sequence: Synthetic polypeptide
  VH of XENP021821

SEQ ID NO: 27458 - protein, 5 aa, Artificial Sequence
  Description of Artificial Sequence: Synthetic peptide
  XENP021821 vhCDR1
SYWIN

SEQ ID NO: 27459 - protein, 17 aa, Artificial Sequence
  Description of Artificial Sequence: Synthetic peptide
  XENP021821 vhCDR2
NIYPSDSYTNYNQMFKD

SEQ ID NO: 27460 - protein, 15 aa, Artificial Sequence
  Description of Artificial Sequence: Synthetic peptide
  XENP021821 vhCDR3
WNLSYYFDNNYYLDY

SEQ ID NO: 27461 - protein, 219 aa, Artificial Sequence; identical to SEQ ID NO: 26317
  Description of Artificial Sequence: Synthetic polypeptide
  XENP021821 GSK_88.2[ICOS]_H0L0_IgG1_PVA_/S267K Light Chain

SEQ ID NO: 27462 - protein, 112 aa, Artificial Sequence; identical to SEQ ID NO: 26318
  Description of Artificial Sequence: Synthetic polypeptide
  VL of XENP021821

SEQ ID NO: 27463 - protein, 16 aa, Artificial Sequence
  Description of Artificial Sequence: Synthetic peptide
  XENP021821 vlCDR1
RSSKSLLHSNGNTYLY

SEQ ID NO: 27464 - protein, 7 aa, Artificial Sequence
  Description of Artificial Sequence: Synthetic peptide
  XENP021821 vlCDR2
RMSNLAS

SEQ ID NO: 27465 - protein, 9 aa, Artificial Sequence
  Description of Artificial Sequence: Synthetic peptide
  XENP021821 vlCDR3
MQHLEYPWT

SEQ ID NO: 27466 - protein, 454 aa, Artificial Sequence; identical to SEQ ID NO: 26322
  Description of Artificial Sequence: Synthetic polypeptide
  XENP021822 jMab-138[ICOS]_H0L0_IgG1_PVA_/S267K Heavy Chain

SEQ ID NO: 27467 - protein, 125 aa, Artificial Sequence; identical to SEQ ID NO: 26323
  Description of Artificial Sequence: Synthetic polypeptide
  VH of XENP021822

SEQ ID NO: 27468 - protein, 5 aa, Artificial Sequence
  Description of Artificial Sequence: Synthetic peptide
  XENP021822 vhCDR1
SYDMH

SEQ ID NO: 27469 - protein, 16 aa, Artificial Sequence
  Description of Artificial Sequence: Synthetic peptide
  XENP021822 vhCDR2
AIGTAGDTYYPGSVKG

SEQ ID NO: 27470 - protein, 17 aa, Artificial Sequence
  Description of Artificial Sequence: Synthetic peptide
  XENP021822 vhCDR3
DNRKVTHEHYYYYGMDV

SEQ ID NO: 27471 - protein, 216 aa, Artificial Sequence; identical to SEQ ID NO: 26327
  Description of Artificial Sequence: Synthetic polypeptide
  XENP021822 jMab-138[ICOS]_H0L0_IgG1_PVA_/S267K Light Chain

SEQ ID NO: 27472 - protein, 109 aa, Artificial Sequence; identical to SEQ ID NO: 26328
  Description of Artificial Sequence: Synthetic polypeptide
  VL of XENP021822

SEQ ID NO: 27473 - protein, 12 aa, Artificial Sequence
  Description of Artificial Sequence: Synthetic peptide
  XENP021822 vlCDR1
RASQNIRSSYLA

SEQ ID NO: 27474 - protein, 7 aa, Artificial Sequence
  Description of Artificial Sequence: Synthetic peptide
  XENP021822 vlCDR2
GASSRAT

SEQ ID NO: 27475 - protein, 10 aa, Artificial Sequence
  Description of Artificial Sequence: Synthetic peptide
  XENP021822 vlCDR3
QQFGSSPMCS

SEQ ID NO: 27476 - protein, 454 aa, Artificial Sequence; identical to SEQ ID NO: 26332
  Description of Artificial Sequence: Synthetic polypeptide
  XENP021823 jMab-139[ICOS]_H0L0_IgG1_PVA_/S267K Heavy Chain

SEQ ID NO: 27477 - protein, 125 aa, Artificial Sequence; identical to SEQ ID NO: 26333
  Description of Artificial Sequence: Synthetic polypeptide
  VH of XENP021823

SEQ ID NO: 27478 - protein, 5 aa, Artificial Sequence
  Description of Artificial Sequence: Synthetic peptide
  XENP021823 vhCDR1
SYDMH

SEQ ID NO: 27479 - protein, 16 aa, Artificial Sequence
  Description of Artificial Sequence: Synthetic peptide
  XENP021823 vhCDR2
AIGTAGDTYYPGSVKG

SEQ ID NO: 27480 - protein, 17 aa, Artificial Sequence
  Description of Artificial Sequence: Synthetic peptide
  XENP021823 vhCDR3
DKRTVTHEHYYYYGMDV

SEQ ID NO: 27481 - protein, 216 aa, Artificial Sequence; identical to SEQ ID NO: 26337
  Description of Artificial Sequence: Synthetic polypeptide
  XENP021823 jMab-139[ICOS]_H0L0_IgG1_PVA_/S267K Light Chain

SEQ ID NO: 27482 - protein, 109 aa, Artificial Sequence; identical to SEQ ID NO: 26338
  Description of Artificial Sequence: Synthetic polypeptide
  VL of XENP021823

SEQ ID NO: 27483 - protein, 12 aa, Artificial Sequence
  Description of Artificial Sequence: Synthetic peptide
  XENP021823 vlCDR1
RASQSISSSSLA

SEQ ID NO: 27484 - protein, 7 aa, Artificial Sequence
  Description of Artificial Sequence: Synthetic peptide
  XENP021823 vlCDR2
GASSRAT

SEQ ID NO: 27485 - protein, 10 aa, Artificial Sequence
  Description of Artificial Sequence: Synthetic peptide
  XENP021823 vlCDR3
QQFGSSPMCS

SEQ ID NO: 27486 - protein, 450 aa, Artificial Sequence; identical to SEQ ID NO: 26342
  Description of Artificial Sequence: Synthetic polypeptide
  XENP022346 WO2016059602_GSK[ICOS]_H0L0 _IgG1_PVA_/S267K Heavy Chain

SEQ ID NO: 27487 - protein, 121 aa, Artificial Sequence; identical to SEQ ID NO: 26343
  Description of Artificial Sequence: Synthetic polypeptide
  VH of XENP022346

SEQ ID NO: 27488 - protein, 5 aa, Artificial Sequence
  Description of Artificial Sequence: Synthetic peptide
  XENP022346 vhCDR1
DYAMH

SEQ ID NO: 27489 - protein, 17 aa, Artificial Sequence
  Description of Artificial Sequence: Synthetic peptide
  XENP022346 vhCDR2
LISIYSDHTNYNQKFQG

SEQ ID NO: 27490 - protein, 12 aa, Artificial Sequence
  Description of Artificial Sequence: Synthetic peptide
  XENP022346 vhCDR3
NNYGNYGWYFDV

SEQ ID NO: 27491 - protein, 213 aa, Artificial Sequence; identical to SEQ ID NO: 26347
  Description of Artificial Sequence: Synthetic polypeptide
  XENP022346 WO2016059602_GSK[ICOS]_H0L0 _IgG1_PVA_/S267K Light Chain

SEQ ID NO: 27492 - protein, 106 aa, Artificial Sequence; identical to SEQ ID NO: 26348
  Description of Artificial Sequence: Synthetic polypeptide
  VL of XENP022346

SEQ ID NO: 27493 - protein, 10 aa, Artificial Sequence
  Description of Artificial Sequence: Synthetic peptide
  XENP022346 vlCDR1
SASSSVSYMH

SEQ ID NO: 27494 - protein, 7 aa, Artificial Sequence
  Description of Artificial Sequence: Synthetic peptide
  XENP022346 vlCDR2
DTSKLAS

SEQ ID NO: 27495 - protein, 9 aa, Artificial Sequence
  Description of Artificial Sequence: Synthetic peptide
  XENP022346 vlCDR3
FQGSGYPYT

SEQ ID NO: 27496 - protein, 446 aa, Artificial Sequence; identical to SEQ ID NO: 26352
  Description of Artificial Sequence: Synthetic polypeptide
  XENP023057 Jounce_37A10S713[ICOS]_H0L0 _IgG1_PVA_/S267K Heavy Chain

SEQ ID NO: 27497 - protein, 117 aa, Artificial Sequence; identical to SEQ ID NO: 26353
  Description of Artificial Sequence: Synthetic polypeptide
  VH of XENP023057

SEQ ID NO: 27498 - protein, 5 aa, Artificial Sequence
  Description of Artificial Sequence: Synthetic peptide
  XENP023057 vhCDR1
DYWMD

SEQ ID NO: 27499 - protein, 17 aa, Artificial Sequence
  Description of Artificial Sequence: Synthetic peptide
  XENP023057 vhCDR2
NIDEDGSITEYSPFVKG

SEQ ID NO: 27500 - protein, 8 aa, Artificial Sequence
  Description of Artificial Sequence: Synthetic peptide
  XENP023057 vhCDR3
WGRFGFDS

SEQ ID NO: 27501 - protein, 218 aa, Artificial Sequence; identical to SEQ ID NO: 26357
  Description of Artificial Sequence: Synthetic polypeptide
  XENP023057 Jounce_37A10S713[ICOS]_H0L0 _IgG1_PVA_/S267K Light Chain

SEQ ID NO: 27502 - protein, 111 aa, Artificial Sequence; identical to SEQ ID NO: 26358
  Description of Artificial Sequence: Synthetic polypeptide
  VL of XENP023057

SEQ ID NO: 27503 - protein, 15 aa, Artificial Sequence
  Description of Artificial Sequence: Synthetic peptide
  XENP023057 vlCDR1
KSSQSLLSGSFNYLT

SEQ ID NO: 27504 - protein, 7 aa, Artificial Sequence
  Description of Artificial Sequence: Synthetic peptide
  XENP023057 vlCDR2
YASTRHT

SEQ ID NO: 27505 - protein, 9 aa, Artificial Sequence
  Description of Artificial Sequence: Synthetic peptide
  XENP023057 vlCDR3
HHHYNAPPT

SEQ ID NO: 27506 - protein, 447 aa, Artificial Sequence
  Description of Artificial Sequence: Synthetic polypeptide
  XENP016434 YW243.55.S70[PD-L1]_H0L0 _IgG1_PVA_/S267K Heavy Chain
EVQLVESGGGLVQPGGSLRLSCAASGFTFSDSWIHWVRQAPGKGLEWVAWISPYGGSTYYADSVKGRFTISADTSKNTAYLQMNSLRAEDTAVYYCARRHWPGGFDYWGQGTLVTVSSASTKGPSVFPLAPSSKSTSGGTAALGCLVKDYFPEPVTVSWNSGALTSGVHTFPAVLQSSGLYSLSSVVTVPSSSLGTQTYICNVNHKPSNTKVDKKVEPKSCDKTHTCPPCPAPPVAGPSVFLFPPKPKDTLMISRTPEVTCVVVDVKHEDPEVKFNWYVDGVEVHNAKTKPREEQYNSTYRVVSVLTVLHQDWLNGKEYKCKVSNKALPAPIEKTISKAKGQPREPQVYTLPPSREEMTKNQVSLTCLVKGFYPSDIAVEWESNGQPENNYKTTPPVLDSDGSFFLYSKLTVDKSRWQQGNVFSCSVMHEALHNHYTQKSLSLSPGK

SEQ ID NO: 27507 - protein, 118 aa, Artificial Sequence [sequence omitted]

SEQ ID NO: 27508 - protein, 5 aa, Artificial Sequence
  Description of Artificial Sequence: Synthetic peptide
  XENP016434 vhCDR1
DSWIH

SEQ ID NO: 27509 - protein, 17 aa, Artificial Sequence
  Description of Artificial Sequence: Synthetic peptide
  XENP016434 vhCDR2
WISPYGGSTYYADSVKG

SEQ ID NO: 27510 - protein, 9 aa, Artificial Sequence
  Description of Artificial Sequence: Synthetic peptide
  XENP016434 vhCDR3
RHWPGGFDY

SEQ ID NO: 27511 - protein, 214 aa, Artificial Sequence; identical to SEQ ID NO: 27132
  Description of Artificial Sequence: Synthetic polypeptide
  XENP016434 YW243.55.S70[PD-L1]_H0L0 _IgG1_PVA_/S267K Light Chain

SEQ ID NO: 27512 - protein, 107 aa, Artificial Sequence [sequence omitted]

SEQ ID NO: 27513 - protein, 11 aa, Artificial Sequence
  Description of Artificial Sequence: Synthetic peptide
  XENP016434 vlCDR1
RASQDVSTAVA

SEQ ID NO: 27514 - protein, 7 aa, Artificial Sequence
  Description of Artificial Sequence: Synthetic peptide
  XENP016434 vlCDR2
SASFLYS

SEQ ID NO: 27515 - protein, 9 aa, Artificial Sequence
  Description of Artificial Sequence: Synthetic peptide
  XENP016434 vlCDR3
QQYLYHPAT

SEQ ID NO: 27516 - protein, 449 aa, Artificial Sequence
  Description of Artificial Sequence: Synthetic polypeptide
  XENP024118 avelumab[PD-L1]_H1L1_IgG1_PVA_/S267K Heavy Chain
EVQLLESGGGLVQPGGSLRLSCAASGFTFSSYIMMWVRQAPGKGLEWVSSIYPSGGITFYADTVKGRFTISRDNSKNTLYLQMNSLRAEDTAVYYCARIKLGTVTTVDYWGQGTLVTVSSASTKGPSVFPLAPSSKSTSGGTAALGCLVKDYFPEPVTVSWNSGALTSGVHTFPAVLQSSGLYSLSSVVTVPSSSLGTQTYICNVNHKPSNTKVDKKVEPKSCDKTHTCPPCPAPPVAGPSVFLFPPKPKDTLMISRTPEVTCVVVDVKHEDPEVKFNWYVDGVEVHNAKTKPREEQYNSTYRVVSVLTVLHQDWLNGKEYKCKVSNKALPAPIEKTISKAKGQPREPQVYTLPPSREEMTKNQVSLTCLVKGFYPSDIAVEWESNGQPENNYKTTPPVLDSDGSFFLYSKLTVDKSRWQQGNVFSCSVMHEALHNHYTQKSLSLSPGK

SEQ ID NO: 27517 - protein, 120 aa, Artificial Sequence; identical to SEQ ID NO: 3977
  Description of Artificial Sequence: Synthetic polypeptide
  VH of XENP024118

SEQ ID NO: 27518 - protein, 5 aa, Artificial Sequence
  Description of Artificial Sequence: Synthetic peptide
  XENP024118 vhCDR1
SYIMM

SEQ ID NO: 27519 - protein, 17 aa, Artificial Sequence
  Description of Artificial Sequence: Synthetic peptide
  XENP024118 vhCDR2
SIYPSGGITFYADTVKG

SEQ ID NO: 27520 - protein, 11 aa, Artificial Sequence
  Description of Artificial Sequence: Synthetic peptide
  XENP024118 vhCDR3
IKLGTVTTVDY

SEQ ID NO: 27521 - protein, 216 aa, Artificial Sequence; identical to SEQ ID NO: 27172
  Description of Artificial Sequence: Synthetic polypeptide
  XENP024118 avelumab[PD-L1]_H1L1_IgG1_PVA_/S267K Light Chain

SEQ ID NO: 27522 - protein, 110 aa, Artificial Sequence; identical to SEQ ID NO: 3981
  Description of Artificial Sequence: Synthetic polypeptide
  VL of XENP024118

SEQ ID NO: 27523 - protein, 14 aa, Artificial Sequence
  Description of Artificial Sequence: Synthetic peptide
  XENP024118 vlCDR1
TGTSSDVGGYNYVS

SEQ ID NO: 27524 - protein, 7 aa, Artificial Sequence
  Description of Artificial Sequence: Synthetic peptide
  XENP024118 vlCDR2
DVSNRPS

SEQ ID NO: 27525 - protein, 10 aa, Artificial Sequence
  Description of Artificial Sequence: Synthetic peptide
  XENP024118 vlCDR3
SSYTSSSTRV

SEQ ID NO: 27526 - protein, 450 aa, Artificial Sequence
  Description of Artificial Sequence: Synthetic polypeptide
  XENP024119 durvalumab[PD-L1]_H1L1_IgG1_PVA_/S267K Heavy Chain
EVQLVESGGGLVQPGGSLRLSCAASGFTFSRYWMSWVRQAPGKGLEWVANIKQDGSEKYYVDSVKGRFTISRDNAKNSLYLQMNSLRAEDTAVYYCAREGGWFGELAFDYWGQGTLVTVSSASTKGPSVFPLAPSSKSTSGGTAALGCLVKDYFPEPVTVSWNSGALTSGVHTFPAVLQSSGLYSLSSVVTVPSSSLGTQTYICNVNHKPSNTKVDKKVEPKSCDKTHTCPPCPAPPVAGPSVFLFPPKPKDTLMISRTPEVTCVVVDVKHEDPEVKFNWYVDGVEVHNAKTKPREEQYNSTYRVVSVLTVLHQDWLNGKEYKCKVSNKALPAPIEKTISKAKGQPREPQVYTLPPSREEMTKNQVSLTCLVKGFYPSDIAVEWESNGQPENNYKTTPPVLDSDGSFFLYSKLTVDKSRWQQGNVFSCSVMHEALHNHYTQKSLSLSPGK

SEQ ID NO: 27527 - protein, 121 aa, Artificial Sequence; identical to SEQ ID NO: 3961
  Description of Artificial Sequence: Synthetic polypeptide
  VH of XENP024119

SEQ ID NO: 27528 - protein, 5 aa, Artificial Sequence
  Description of Artificial Sequence: Synthetic peptide
  XENP024119 vhCDR1
RYWMS

SEQ ID NO: 27529 - protein, 17 aa, Artificial Sequence
  Description of Artificial Sequence: Synthetic peptide
  XENP024119 vhCDR2
NIKQDGSEKYYVDSVKG

SEQ ID NO: 27530 - protein, 12 aa, Artificial Sequence
  Description of Artificial Sequence: Synthetic peptide
  XENP024119 vhCDR3
EGGWFGELAFDY

SEQ ID NO: 27531 - protein, 215 aa, Artificial Sequence; identical to SEQ ID NO: 27152
  Description of Artificial Sequence: Synthetic polypeptide
  XENP024119 durvalumab[PD-L1]_H1L1_IgG1_PVA_/S267K Light Chain

SEQ ID NO: 27532 - protein, 108 aa, Artificial Sequence; identical to SEQ ID NO: 3965
  Description of Artificial Sequence: Synthetic polypeptide
  VL of XENP024119

SEQ ID NO: 27533 - protein, 12 aa, Artificial Sequence
  Description of Artificial Sequence: Synthetic peptide
  XENP024119 vlCDR1
RASQRVSSSYLA

SEQ ID NO: 27534 - protein, 7 aa, Artificial Sequence
  Description of Artificial Sequence: Synthetic peptide
  XENP024119 vlCDR2
DASSRAT

SEQ ID NO: 27535 - protein, 9 aa, Artificial Sequence
  Description of Artificial Sequence: Synthetic peptide
  XENP024119 vlCDR3
QQYGSLPWT

SEQ ID NO: 27536 - protein, 456 aa, Artificial Sequence
  Description of Artificial Sequence: Synthetic polypeptide
  XENP024120 LOPD180[PD-1]_H1L1_IgG1_PVA_/S267K Heavy Chain
QVQLQESGPGLVKPSQTLSLTCTVSGGSISSGAYYWSWIRQHPGKGLEWIGYIYYNGNTYYNPSLRSRVTISVDTSKNQFSLKLSSVTAADTAVYYCVRASDYVWGGYHYFDAFDLWGRGTLVTVSSASTKGPSVFPLAPSSKSTSGGTAALGCLVKDYFPEPVTVSWNSGALTSGVHTFPAVLQSSGLYSLSSVVTVPSSSLGTQTYICNVNHKPSNTKVDKKVEPKSCDKTHTCPPCPAPPVAGPSVFLFPPKPKDTLMISRTPEVTCVVVDVKHEDPEVKFNWYVDGVEVHNAKTKPREEQYNSTYRVVSVLTVLHQDWLNGKEYKCKVSNKALPAPIEKTISKAKGQPREPQVYTLPPSREEMTKNQVSLTCLVKGFYPSDIAVEWESNGQPENNYKTTPPVLDSDGSFFLYSKLTVDKSRWQQGNVFSCSVMHEALHNHYTQKSLSLSPGK

SEQ ID NO: 27537 - protein, 127 aa, Artificial Sequence; identical to SEQ ID NO: 26823
  Description of Artificial Sequence: Synthetic polypeptide
  VH of XENP024120

SEQ ID NO: 27538 - protein, 7 aa, Artificial Sequence
  Description of Artificial Sequence: Synthetic peptide
  XENP024120 vhCDR1
SGAYYWS

SEQ ID NO: 27539 - protein, 16 aa, Artificial Sequence
  Description of Artificial Sequence: Synthetic peptide
  XENP024120 vhCDR2
YIYYNGNTYYNPSLRS

SEQ ID NO: 27540 - protein, 17 aa, Artificial Sequence
  Description of Artificial Sequence: Synthetic peptide
  XENP024120 vhCDR3
ASDYVWGGYHYFDAFDL

SEQ ID NO: 27541 - protein, 216 aa, Artificial Sequence; identical to SEQ ID NO: 26837
  Description of Artificial Sequence: Synthetic polypeptide
  XENP024120 LOPD180[PD-1]_H1L1_IgG1_PVA_/S267K Light Chain

SEQ ID NO: 27542 - protein, 110 aa, Artificial Sequence; identical to SEQ ID NO: 26838
  Description of Artificial Sequence: Synthetic polypeptide
  VL of XENP024120

SEQ ID NO: 27543 - protein, 13 aa, Artificial Sequence
  Description of Artificial Sequence: Synthetic peptide
  XENP024120 vlCDR1
SGSNSNIGSNSVN

SEQ ID NO: 27544 - protein, 7 aa, Artificial Sequence
  Description of Artificial Sequence: Synthetic peptide
  XENP024120 vlCDR2
GNNQRPS

SEQ ID NO: 27545 - protein, 11 aa, Artificial Sequence
  Description of Artificial Sequence: Synthetic peptide
  XENP024120 vlCDR3
AAWDDSLNGPV

SEQ ID NO: 27546 - protein, 448 aa, Artificial Sequence
  Description of Artificial Sequence: Synthetic polypeptide
  XENP024121 mAb7(1.2)[PD-1]_H1L1_IgG1_PVA_/S267K Heavy Chain
QVQLVQSGAEVKKPGASVKVSCKASGYSFTSYWMNWVRQAPGQGLEWIGVIHPSDSETWLDQKFKDRVTITVDKSTSTAYMELSSLRSEDTAVYYCAREHYGTSPFAYWGQGTLVTVSSASTKGPSVFPLAPSSKSTSGGTAALGCLVKDYFPEPVTVSWNSGALTSGVHTFPAVLQSSGLYSLSSVVTVPSSSLGTQTYICNVNHKPSNTKVDKKVEPKSCDKTHTCPPCPAPPVAGPSVFLFPPKPKDTLMISRTPEVTCVVVDVKHEDPEVKFNWYVDGVEVHNAKTKPREEQYNSTYRVVSVLTVLHQDWLNGKEYKCKVSNKALPAPIEKTISKAKGQPREPQVYTLPPSREEMTKNQVSLTCLVKGFYPSDIAVEWESNGQPENNYKTTPPVLDSDGSFFLYSKLTVDKSRWQQGNVFSCSVMHEALHNHYTQKSLSLSPGK

SEQ ID NO: 27547 - protein, 119 aa, Artificial Sequence; identical to SEQ ID NO: 27009
  Description of Artificial Sequence: Synthetic polypeptide
  VH of XENP024121

SEQ ID NO: 27548 - protein, 5 aa, Artificial Sequence
  Description of Artificial Sequence: Synthetic peptide
  XENP024121 vhCDR1
SYWMN

SEQ ID NO: 27549 - protein, 17 aa, Artificial Sequence
  Description of Artificial Sequence: Synthetic peptide
  XENP024121 vhCDR2
VIHPSDSETWLDQKFKD

SEQ ID NO: 27550 - protein, 10 aa, Artificial Sequence
  Description of Artificial Sequence: Synthetic peptide
  XENP024121 vhCDR3
EHYGTSPFAY

SEQ ID NO: 27551 - protein, 218 aa, Artificial Sequence
  Description of Artificial Sequence: Synthetic polypeptide
  XENP024121 mAb7(1.2)[PD-1]_H1L1_IgG1_PVA_/S267K Light Chain
EIVLTQSPATLSLSPGERATLSCRASESVDNYGMSFMNWFQQKPGQPPKLLIHAASNQGSGVPSRFSGSGSGTDFTLTISSLEPEDFAVYFCQQSKEVPYTFGGGTKVEIKRTVAAPSVFIFPPSDEQLKSGTASVVCLLNNFYPREAKVQWKVDNALQSGNSQESVTEQDSKDSTYSLSSTLTLSKADYEKHKVYACEVTHQGLSSPVTKSFNRGEC

SEQ ID NO: 27552 - protein, 111 aa, Artificial Sequence; identical to SEQ ID NO: 27008
  Description of Artificial Sequence: Synthetic polypeptide
  VL of XENP024121

SEQ ID NO: 27553 - protein, 15 aa, Artificial Sequence
  Description of Artificial Sequence: Synthetic peptide
  XENP024121 vlCDR1
RASESVDNYGMSFMN

SEQ ID NO: 27554 - protein, 7 aa, Artificial Sequence
  Description of Artificial Sequence: Synthetic peptide
  XENP024121 vlCDR2
AASNQGS

SEQ ID NO: 27555 - protein, 9 aa, Artificial Sequence
  Description of Artificial Sequence: Synthetic peptide
  XENP024121 vlCDR3
QQSKEVPYT

SEQ ID NO: 27556 - protein, 452 aa, Artificial Sequence; identical to SEQ ID NO: 26682
  Description of Artificial Sequence: Synthetic polypeptide
  XENP021832 GSK_314.8[ICOS]_H0L0 _Fab-YW243.55.S70[PD-L1]_H0L0_scFv Fab-Fc Heavy Chain

SEQ ID NO: 27557 - protein, 123 aa, Artificial Sequence; identical to SEQ ID NO: 26303
  Description of Artificial Sequence: Synthetic polypeptide
  VH of XENP021832

SEQ ID NO: 27558 - protein, 5 aa, Artificial Sequence
  Description of Artificial Sequence: Synthetic peptide
  XENP021832 vhCDR1
TYWMH

SEQ ID NO: 27559 - protein, 17 aa, Artificial Sequence
  Description of Artificial Sequence: Synthetic peptide
  XENP021832 vhCDR2
EIDPSDSYVNYNQNFKG

SEQ ID NO: 27560 - protein, 14 aa, Artificial Sequence
  Description of Artificial Sequence: Synthetic peptide
  XENP021832 vhCDR3
SPDYYGTSLAWFDY

SEQ ID NO: 27561 - protein, 471 aa, Artificial Sequence
  Description of Artificial Sequence: Synthetic polypeptide
  XENP021832 GSK_314.8[ICOS]_H0L0 _Fab-YW243.55.S70[PD-L1]_H0L0_scFv scFv-Fc Heavy Chain
EVQLVESGGGLVQPGGSLRLSCAASGFTFSDSWIHWVRQAPGKGLEWVAWISPYGGSTYYADSVKGRFTISADTSKNTAYLQMNSLRAEDTAVYYCARRHWPGGFDYWGQGTLVTVSSGGGGSGGGGSGGGGSDIQMTQSPSSLSASVGDRVTITCRASQDVSTAVAWYQQKPGKAPKLLIYSASFLYSGVPSRFSGSGSGTDFTLTISSLQPEDFATYYCQQYLYHPATFGQGTKVEIKEPKSSDKTHTCPPCPAPPVAGPSVFLFPPKPKDTLMISRTPEVTCVVVDVKHEDPEVKFNWYVDGVEVHNAKTKPREEQYNSTYRVVSVLTVLHQDWLNGKEYKCKVSNKALPAPIEKTISKAKGQPREPQVYTLPPSREQMTKNQVKLTCLVKGFYPSDIAVEWESNGQPENNYKTTPPVLDSDGSFFLYSKLTVDKSRWQQGNVFSCSVMHEALHNHYTQKSLSLSPGK

SEQ ID NO: 27562 - protein, 118 aa, Artificial Sequence [sequence omitted]

SEQ ID NO: 27563 - protein, 107 aa, Artificial Sequence [sequence omitted]

SEQ ID NO: 27564 - protein, 231 aa, Artificial Sequence; identical to SEQ ID NO: 2397
  Description of Artificial Sequence: Synthetic polypeptide
  Fc chain of XENP021832

SEQ ID NO: 27565 - protein, 5 aa, Artificial Sequence
  Description of Artificial Sequence: Synthetic peptide
  XENP021832 vhCDR1
DSWIH

SEQ ID NO: 27566 - protein, 17 aa, Artificial Sequence
  Description of Artificial Sequence: Synthetic peptide
  XENP021832 vhCDR2
WISPYGGSTYYADSVKG

SEQ ID NO: 27567 - protein, 9 aa, Artificial Sequence
  Description of Artificial Sequence: Synthetic peptide
  XENP021832 vhCDR3
RHWPGGFDY

SEQ ID NO: 27568 - protein, 11 aa, Artificial Sequence
  Description of Artificial Sequence: Synthetic peptide
  XENP021832 vlCDR1
RASQDVSTAVA

SEQ ID NO: 27569 - protein, 7 aa, Artificial Sequence
  Description of Artificial Sequence: Synthetic peptide
  XENP021832 vlCDR2
SASFLYS

SEQ ID NO: 27570 - protein, 9 aa, Artificial Sequence
  Description of Artificial Sequence: Synthetic peptide
  XENP021832 vlCDR3
QQYLYHPAT

SEQ ID NO: 27571 - protein, 219 aa, Artificial Sequence; identical to SEQ ID NO: 26307
  Description of Artificial Sequence: Synthetic polypeptide
  XENP021832 GSK_314.8[ICOS]_H0L0 _Fab-YW243.55.S70[PD-L1]_H0L0_scFv Light Chain

SEQ ID NO: 27572 - protein, 112 aa, Artificial Sequence; identical to SEQ ID NO: 26308
  Description of Artificial Sequence: Synthetic polypeptide
  VL of XENP021832

SEQ ID NO: 27573 - protein, 16 aa, Artificial Sequence
  Description of Artificial Sequence: Synthetic peptide
  XENP021832 vlCDR1
RSSKSPLHSNGNIYLY

SEQ ID NO: 27574 - protein, 7 aa, Artificial Sequence
  Description of Artificial Sequence: Synthetic peptide
  XENP021832 vlCDR2
RMSNLAS

SEQ ID NO: 27575 - protein, 9 aa, Artificial Sequence
  Description of Artificial Sequence: Synthetic peptide
  XENP021832 vlCDR3
MQHLEYPYT

SEQ ID NO: 27576 - protein, 453 aa, Artificial Sequence; identical to SEQ ID NO: 26702
  Description of Artificial Sequence: Synthetic polypeptide
  XENP021833 GSK_88.2[ICOS]_H0L0 _Fab-YW243.55.S70[PD-L1]_H0L0_scFv Fab-Fc Heavy Chain

SEQ ID NO: 27577 - protein, 124 aa, Artificial Sequence; identical to SEQ ID NO: 26313
  Description of Artificial Sequence: Synthetic polypeptide
  VH of XENP021833

SEQ ID NO: 27578 - protein, 5 aa, Artificial Sequence
  Description of Artificial Sequence: Synthetic peptide
  XENP021833 vhCDR1
SYWIN

SEQ ID NO: 27579 - protein, 17 aa, Artificial Sequence
  Description of Artificial Sequence: Synthetic peptide
  XENP021833 vhCDR2
NIYPSDSYTNYNQMFKD

SEQ ID NO: 27580 - protein, 15 aa, Artificial Sequence
  Description of Artificial Sequence: Synthetic peptide
  XENP021833 vhCDR3
WNLSYYFDNNYYLDY

SEQ ID NO: 27581 - protein, 471 aa, Artificial Sequence; identical to SEQ ID NO: 27561
  Description of Artificial Sequence: Synthetic polypeptide
  XENP021833 GSK_88.2[ICOS]_H0L0 _Fab-YW243.55.S70[PD-L1]_H0L0_scFv scFv-Fc Heavy Chain

SEQ ID NO: 27582 - protein, 118 aa, Artificial Sequence [sequence omitted]

SEQ ID NO: 27583 - protein, 107 aa, Artificial Sequence [sequence omitted]

SEQ ID NO: 27584 - protein, 231 aa, Artificial Sequence; identical to SEQ ID NO: 2397
  Description of Artificial Sequence: Synthetic polypeptide
  Fc chain of XENP021833

SEQ ID NO: 27585 - protein, 5 aa, Artificial Sequence
  Description of Artificial Sequence: Synthetic peptide
  XENP021833 vhCDR1
DSWIH

SEQ ID NO: 27586 - protein, 17 aa, Artificial Sequence
  Description of Artificial Sequence: Synthetic peptide
  XENP021833 vhCDR2
WISPYGGSTYYADSVKG

SEQ ID NO: 27587 - protein, 9 aa, Artificial Sequence
  Description of Artificial Sequence: Synthetic peptide
  XENP021833 vhCDR3
RHWPGGFDY

SEQ ID NO: 27588 - protein, 11 aa, Artificial Sequence
  Description of Artificial Sequence: Synthetic peptide
  XENP021833 vlCDR1
RASQDVSTAVA

SEQ ID NO: 27589 - protein, 7 aa, Artificial Sequence
  Description of Artificial Sequence: Synthetic peptide
  XENP021833 vlCDR2
SASFLYS

SEQ ID NO: 27590 - protein, 9 aa, Artificial Sequence
  Description of Artificial Sequence: Synthetic peptide
  XENP021833 vlCDR3
QQYLYHPAT

SEQ ID NO: 27591 - protein, 219 aa, Artificial Sequence; identical to SEQ ID NO: 26317
  Description of Artificial Sequence: Synthetic polypeptide
  XENP021833 GSK_88.2[ICOS]_H0L0 _Fab-YW243.55.S70[PD-L1]_H0L0_scFv Light Chain

SEQ ID NO: 27592 - protein, 112 aa, Artificial Sequence; identical to SEQ ID NO: 26318
  Description of Artificial Sequence: Synthetic polypeptide
  VL of XENP021833

SEQ ID NO: 27593 - protein, 16 aa, Artificial Sequence
  Description of Artificial Sequence: Synthetic peptide
  XENP021833 vlCDR1
RSSKSLLHSNGNTYLY

SEQ ID NO: 27594 - protein, 7 aa, Artificial Sequence
  Description of Artificial Sequence: Synthetic peptide
  XENP021833 vlCDR2
RMSNLAS

SEQ ID NO: 27595 - protein, 9 aa, Artificial Sequence
  Description of Artificial Sequence: Synthetic peptide
  XENP021833 vlCDR3
MQHLEYPWT

SEQ ID NO: 27596 - protein, 454 aa, Artificial Sequence; identical to SEQ ID NO: 26722
  Description of Artificial Sequence: Synthetic polypeptide
  XENP021834 jMab-138[ICOS]_H0L0 _Fab-YW243.55.S70[PD-L1]_H0L0_scFv Fab-Fc Heavy Chain

SEQ ID NO: 27597 - protein, 125 aa, Artificial Sequence; identical to SEQ ID NO: 26323
  Description of Artificial Sequence: Synthetic polypeptide
  VH of XENP021834

SEQ ID NO: 27598 - protein, 5 aa, Artificial Sequence
  Description of Artificial Sequence: Synthetic peptide
  XENP021834 vhCDR1
SYDMH

SEQ ID NO: 27599 - protein, 16 aa, Artificial Sequence
  Description of Artificial Sequence: Synthetic peptide
  XENP021834 vhCDR2
AIGTAGDTYYPGSVKG

SEQ ID NO: 27600 - protein, 17 aa, Artificial Sequence
  Description of Artificial Sequence: Synthetic peptide
  XENP021834 vhCDR3
DNRKVTHEHYYYYGMDV

SEQ ID NO: 27601 - protein, 471 aa, Artificial Sequence; identical to SEQ ID NO: 27561
  Description of Artificial Sequence: Synthetic polypeptide
  XENP021834 jMab-138[ICOS]_H0L0 _Fab-YW243.55.S70[PD-L1]_H0L0_scFv scFv-Fc Heavy Chain

SEQ ID NO: 27602 - protein, 118 aa, Artificial Sequence [sequence omitted]

SEQ ID NO: 27603 - protein, 107 aa, Artificial Sequence [sequence omitted]

SEQ ID NO: 27604 - protein, 231 aa, Artificial Sequence; identical to SEQ ID NO: 2397
  Description of Artificial Sequence: Synthetic polypeptide
  Fc chain of XENP021834

SEQ ID NO: 27605 - protein, 5 aa, Artificial Sequence
  Description of Artificial Sequence: Synthetic peptide
  XENP021834 vhCDR1
DSWIH

SEQ ID NO: 27606 - protein, 17 aa, Artificial Sequence
  Description of Artificial Sequence: Synthetic peptide
  XENP021834 vhCDR2
WISPYGGSTYYADSVKG

SEQ ID NO: 27607 - protein, 9 aa, Artificial Sequence
  Description of Artificial Sequence: Synthetic peptide
  XENP021834 vhCDR3
RHWPGGFDY

SEQ ID NO: 27608 - protein, 11 aa, Artificial Sequence
  Description of Artificial Sequence: Synthetic peptide
  XENP021834 vlCDR1
RASQDVSTAVA

SEQ ID NO: 27609 - protein, 7 aa, Artificial Sequence
  Description of Artificial Sequence: Synthetic peptide
  XENP021834 vlCDR2
SASFLYS

SEQ ID NO: 27610 - protein, 9 aa, Artificial Sequence
  Description of Artificial Sequence: Synthetic peptide
  XENP021834 vlCDR3
QQYLYHPAT

SEQ ID NO: 27611 - protein, 216 aa, Artificial Sequence; identical to SEQ ID NO: 26327
  Description of Artificial Sequence: Synthetic polypeptide
  XENP021834 jMab-138[ICOS]_H0L0 _Fab-YW243.55.S70[PD-L1]_H0L0_scFv Light Chain

SEQ ID NO: 27612 - protein, 109 aa, Artificial Sequence; identical to SEQ ID NO: 26328
  Description of Artificial Sequence: Synthetic polypeptide
  VL of XENP021834

SEQ ID NO: 27613 - protein, 12 aa, Artificial Sequence
  Description of Artificial Sequence: Synthetic peptide
  XENP021834 vlCDR1
RASQNIRSSYLA

SEQ ID NO: 27614 - protein, 7 aa, Artificial Sequence
  Description of Artificial Sequence: Synthetic peptide
  XENP021834 vlCDR2
GASSRAT

SEQ ID NO: 27615 - protein, 10 aa, Artificial Sequence
  Description of Artificial Sequence: Synthetic peptide
  XENP021834 vlCDR3
QQFGSSPMCS

SEQ ID NO: 27616 - protein, 454 aa, Artificial Sequence; identical to SEQ ID NO: 26742
  Description of Artificial Sequence: Synthetic polypeptide
  XENP021835 jMab-139[ICOS]_H0L0 _Fab-YW243.55.S70[PD-L1]_H0L0_scFv Fab-Fc Heavy Chain

SEQ ID NO: 27617 - protein, 125 aa, Artificial Sequence; identical to SEQ ID NO: 26333
  Description of Artificial Sequence: Synthetic polypeptide
  VH of XENP021835

SEQ ID NO: 27618 - protein, 5 aa, Artificial Sequence
  Description of Artificial Sequence: Synthetic peptide
  XENP021835 vhCDR1
SYDMH

SEQ ID NO: 27619 - protein, 16 aa, Artificial Sequence
  Description of Artificial Sequence: Synthetic peptide
  XENP021835 vhCDR2
AIGTAGDTYYPGSVKG

SEQ ID NO: 27620 - protein, 17 aa, Artificial Sequence
  Description of Artificial Sequence: Synthetic peptide
  XENP021835 vhCDR3
DKRTVTHEHYYYYGMDV

SEQ ID NO: 27621 - protein, 471 aa, Artificial Sequence; identical to SEQ ID NO: 27561
  Description of Artificial Sequence: Synthetic polypeptide
  XENP021835 jMab-139[ICOS]_H0L0 _Fab-YW243.55.S70[PD-L1]_H0L0_scFv scFv-Fc Heavy Chain

SEQ ID NO: 27622 - protein, 118 aa, Artificial Sequence [sequence omitted]

SEQ ID NO: 27623 - protein, 107 aa, Artificial Sequence [sequence omitted]

SEQ ID NO: 27624 - protein, 231 aa, Artificial Sequence; identical to SEQ ID NO: 2397
  Description of Artificial Sequence: Synthetic polypeptide
  Fc chain of XENP021835

SEQ ID NO: 27625 - protein, 5 aa, Artificial Sequence
  Description of Artificial Sequence: Synthetic peptide
  XENP021835 vhCDR1
DSWIH

SEQ ID NO: 27626 - protein, 17 aa, Artificial Sequence
  Description of Artificial Sequence: Synthetic peptide
  XENP021835 vhCDR2
WISPYGGSTYYADSVKG

SEQ ID NO: 27627 - protein, 9 aa, Artificial Sequence
  Description of Artificial Sequence: Synthetic peptide
  XENP021835 vhCDR3
RHWPGGFDY

SEQ ID NO: 27628 - protein, 11 aa, Artificial Sequence
  Description of Artificial Sequence: Synthetic peptide
  XENP021835 vlCDR1
RASQDVSTAVA

SEQ ID NO: 27629 - protein, 7 aa, Artificial Sequence
  Description of Artificial Sequence: Synthetic peptide
  XENP021835 vlCDR2
SASFLYS

SEQ ID NO: 27630 - protein, 9 aa, Artificial Sequence
  Description of Artificial Sequence: Synthetic peptide
  XENP021835 vlCDR3
QQYLYHPAT

SEQ ID NO: 27631 - protein, 216 aa, Artificial Sequence; identical to SEQ ID NO: 26337
  Description of Artificial Sequence: Synthetic polypeptide
  XENP021835 jMab-139[ICOS]_H0L0 _Fab-YW243.55.S70[PD-L1]_H0L0_scFv Light Chain

SEQ ID NO: 27632 - protein, 109 aa, Artificial Sequence; identical to SEQ ID NO: 26338
  Description of Artificial Sequence: Synthetic polypeptide
  VL of XENP021835

SEQ ID NO: 27633 - protein, 12 aa, Artificial Sequence
  Description of Artificial Sequence: Synthetic peptide
  XENP021835 vlCDR1
RASQSISSSSLA

SEQ ID NO: 27634 - protein, 7 aa, Artificial Sequence
  Description of Artificial Sequence: Synthetic peptide
  XENP021835 vlCDR2
GASSRAT

SEQ ID NO: 27635 - protein, 10 aa, Artificial Sequence
  Description of Artificial Sequence: Synthetic peptide
  XENP021835 vlCDR3
QQFGSSPMCS

SEQ ID NO: 27636 - protein, 454 aa, Artificial Sequence; identical to SEQ ID NO: 26442
  Description of Artificial Sequence: Synthetic polypeptide
  XENP021836 jMab-136[ICOS]_H0L0 _Fab-YW243.55.S70[PD-L1]_H0L0_scFv Fab-Fc Heavy Chain

SEQ ID NO: 27637 - protein, 125 aa, Artificial Sequence; identical to SEQ ID NO: 26293
  Description of Artificial Sequence: Synthetic polypeptide
  VH of XENP021836

SEQ ID NO: 27638 - protein, 5 aa, Artificial Sequence
  Description of Artificial Sequence: Synthetic peptide
  XENP021836 vhCDR1
GYYMH

SEQ ID NO: 27639 - protein, 17 aa, Artificial Sequence
  Description of Artificial Sequence: Synthetic peptide
  XENP021836 vhCDR2
WINPHSGGTNYAQKFQG

SEQ ID NO: 27640 - protein, 16 aa, Artificial Sequence
  Description of Artificial Sequence: Synthetic peptide
  XENP021836 vhCDR3
TYYYDSSGYYHDAFDI

SEQ ID NO: 27641 - protein, 471 aa, Artificial Sequence; identical to SEQ ID NO: 27561
  Description of Artificial Sequence: Synthetic polypeptide
  XENP021836 jMab-136[ICOS]_H0L0 _Fab-YW243.55.S70[PD-L1]_H0L0_scFv scFv-Fc Heavy Chain

SEQ ID NO: 27642 - protein, 118 aa, Artificial Sequence [sequence omitted]

SEQ ID NO: 27643 - protein, 107 aa, Artificial Sequence [sequence omitted]

SEQ ID NO: 27644 - protein, 231 aa, Artificial Sequence; identical to SEQ ID NO: 2397
  Description of Artificial Sequence: Synthetic polypeptide
  Fc chain of XENP021836

SEQ ID NO: 27645 - protein, 5 aa, Artificial Sequence
  Description of Artificial Sequence: Synthetic peptide
  XENP021836 vhCDR1
DSWIH

SEQ ID NO: 27646 - protein, 17 aa, Artificial Sequence
  Description of Artificial Sequence: Synthetic peptide
  XENP021836 vhCDR2
WISPYGGSTYYADSVKG

SEQ ID NO: 27647 - protein, 9 aa, Artificial Sequence
  Description of Artificial Sequence: Synthetic peptide
  XENP021836 vhCDR3
RHWPGGFDY

SEQ ID NO: 27648 - protein, 11 aa, Artificial Sequence
  Description of Artificial Sequence: Synthetic peptide
  XENP021836 vlCDR1
RASQDVSTAVA

SEQ ID NO: 27649 - protein, 7 aa, Artificial Sequence
  Description of Artificial Sequence: Synthetic peptide
  XENP021836 vlCDR2
SASFLYS

SEQ ID NO: 27650 - protein, 9 aa, Artificial Sequence
  Description of Artificial Sequence: Synthetic peptide
  XENP021836 vlCDR3
QQYLYHPAT

SEQ ID NO: 27651 - protein, 214 aa, Artificial Sequence; identical to SEQ ID NO: 26297
  Description of Artificial Sequence: Synthetic polypeptide
  XENP021836 jMab-136[ICOS]_H0L0 _Fab-YW243.55.S70[PD-L1]_H0L0_scFv Light Chain

SEQ ID NO: 27652 - protein, 107 aa, Artificial Sequence; identical to SEQ ID NO: 26298
  Description of Artificial Sequence: Synthetic polypeptide
  VL of XENP021836

SEQ ID NO: 27653 - protein, 11 aa, Artificial Sequence
  Description of Artificial Sequence: Synthetic peptide
  XENP021836 vlCDR1
RASQGISRLLA

SEQ ID NO: 27654 - protein, 7 aa, Artificial Sequence
  Description of Artificial Sequence: Synthetic peptide
  XENP021836 vlCDR2
VASSLQS

SEQ ID NO: 27655 - protein, 9 aa, Artificial Sequence
  Description of Artificial Sequence: Synthetic peptide
  XENP021836 vlCDR3
QQANSFPWT

SEQ ID NO: 27656 - protein, 442 aa, Artificial Sequence; identical to SEQ ID NO: 26802
  Description of Artificial Sequence: Synthetic polypeptide
  XENP018920 nivolumab[PD-1]_H0L0 _Fab-[anti-ICOS]_H0L0_scFv Fab-Fc Heavy Chain

SEQ ID NO: 27657 - protein, 113 aa, Artificial Sequence [sequence omitted]

SEQ ID NO: 27658 - protein, 5 aa, Artificial Sequence
  Description of Artificial Sequence: Synthetic peptide
  XENP018920 vhCDR1
NSGMH

SEQ ID NO: 27659 - protein, 17 aa, Artificial Sequence
  Description of Artificial Sequence: Synthetic peptide
  XENP018920 vhCDR2
VIWYDGSKRYYADSVKG

SEQ ID NO: 27660 - protein, 4 aa, Artificial Sequence
  Description of Artificial Sequence: Synthetic peptide
  XENP018920 vhCDR3
NDDY

SEQ ID NO: 27661 - protein, 471 aa, Artificial Sequence; identical to SEQ ID NO: 26807
  Description of Artificial Sequence: Synthetic polypeptide
  XENP018920 nivolumab[PD-1]_H0L0 _Fab-[anti-ICOS]_H0L0_scFv scFv-Fc Heavy Chain

SEQ ID NO: 27662 - protein, 113 aa, Artificial Sequence; identical to SEQ ID NO: 10886
  Description of Artificial Sequence: Synthetic polypeptide
  VH of XENP018920

SEQ ID NO: 27663 - protein, 107 aa, Artificial Sequence [sequence omitted]

SEQ ID NO: 27664 - protein, 231 aa, Artificial Sequence; identical to SEQ ID NO: 2397
  Description of Artificial Sequence: Synthetic polypeptide
  Fc chain of XENP018920

SEQ ID NO: 27665 - protein, 5 aa, Artificial Sequence
  Description of Artificial Sequence: Synthetic peptide
  XENP018920 vhCDR1
NSGMH

SEQ ID NO: 27666 - protein, 17 aa, Artificial Sequence
  Description of Artificial Sequence: Synthetic peptide
  XENP018920 vhCDR2
VIWYDGSKRYYADSVKG

SEQ ID NO: 27667 - protein, 4 aa, Artificial Sequence
  Description of Artificial Sequence: Synthetic peptide
  XENP018920 vhCDR3
NDDY

SEQ ID NO: 27668 - protein, 11 aa, Artificial Sequence
  Description of Artificial Sequence: Synthetic peptide
  XENP018920 vlCDR1
RASQSVSSYLA

SEQ ID NO: 27669 - protein, 7 aa, Artificial Sequence
  Description of Artificial Sequence: Synthetic peptide
  XENP018920 vlCDR2
DASNRAT

SEQ ID NO: 27670 - protein, 9 aa, Artificial Sequence
  Description of Artificial Sequence: Synthetic peptide
  XENP018920 vlCDR3
QQSSNWPRT

SEQ ID NO: 27671 - protein, 214 aa, Artificial Sequence; identical to SEQ ID NO: 16146
  Description of Artificial Sequence: Synthetic polypeptide
  XENP018920 nivolumab[PD-1]_H0L0 _Fab-[anti-ICOS]_H0L0_scFv Light Chain

SEQ ID NO: 27672 - protein, 107 aa, Artificial Sequence [sequence omitted]

SEQ ID NO: 27673 - protein, 11 aa, Artificial Sequence
  Description of Artificial Sequence: Synthetic peptide
  XENP018920 vlCDR1
RASQSVSSYLA

SEQ ID NO: 27674 - protein, 7 aa, Artificial Sequence
  Description of Artificial Sequence: Synthetic peptide
  XENP018920 vlCDR2
DASNRAT

SEQ ID NO: 27675 - protein, 9 aa, Artificial Sequence
  Description of Artificial Sequence: Synthetic peptide
  XENP018920 vlCDR3
QQSSNWPRT

SEQ ID NO: 27676 - protein, 456 aa, Artificial Sequence; identical to SEQ ID NO: 26822
  Description of Artificial Sequence: Synthetic polypeptide
  XENP024130 LOPD180[PD-1]_H1L1_Fab-[anti-ICOS]_H0L0 _scFv Fab-Fc Heavy Chain

SEQ ID NO: 27677 - protein, 127 aa, Artificial Sequence; identical to SEQ ID NO: 26823
  Description of Artificial Sequence: Synthetic polypeptide
  VH of XENP024130

SEQ ID NO: 27678 - protein, 7 aa, Artificial Sequence
  Description of Artificial Sequence: Synthetic peptide
  XENP024130 vhCDR1
SGAYYWS

SEQ ID NO: 27679 - protein, 16 aa, Artificial Sequence
  Description of Artificial Sequence: Synthetic peptide
  XENP024130 vhCDR2
YIYYNGNTYYNPSLRS

SEQ ID NO: 27680 - protein, 17 aa, Artificial Sequence
  Description of Artificial Sequence: Synthetic peptide
  XENP024130 vhCDR3
ASDYVWGGYHYFDAFDL

SEQ ID NO: 27681 - protein, 483 aa, Artificial Sequence; identical to SEQ ID NO: 26827
  Description of Artificial Sequence: Synthetic polypeptide
  XENP024130 LOPD180[PD-1]_H1L1_Fab-[anti-ICOS]_H0L0 _scFv scFv-Fc Heavy Chain

SEQ ID NO: 27682 - protein, 125 aa, Artificial Sequence; identical to SEQ ID NO: 26293
  Description of Artificial Sequence: Synthetic polypeptide
  VH of XENP024130

SEQ ID NO: 27683 - protein, 107 aa, Artificial Sequence; identical to SEQ ID NO: 26298
  Description of Artificial Sequence: Synthetic polypeptide
  VL of XENP024130

SEQ ID NO: 27684 - protein, 231 aa, Artificial Sequence; identical to SEQ ID NO: 2397
  Description of Artificial Sequence: Synthetic polypeptide
  Fc chain of XENP024130

SEQ ID NO: 27685 - protein, 5 aa, Artificial Sequence
  Description of Artificial Sequence: Synthetic peptide
  XENP024130 vhCDR1
GYYMH

SEQ ID NO: 27686 - protein, 17 aa, Artificial Sequence
  Description of Artificial Sequence: Synthetic peptide
  XENP024130 vhCDR2
WINPHSGGTNYAQKFQG

SEQ ID NO: 27687 - protein, 16 aa, Artificial Sequence
  Description of Artificial Sequence: Synthetic peptide
  XENP024130 vhCDR3
TYYYDSSGYYHDAFDI

SEQ ID NO: 27688 - protein, 11 aa, Artificial Sequence
  Description of Artificial Sequence: Synthetic peptide
  XENP024130 vlCDR1
RASQGISRLLA

SEQ ID NO: 27689 - protein, 7 aa, Artificial Sequence
  Description of Artificial Sequence: Synthetic peptide
  XENP024130 vlCDR2
VASSLQS

SEQ ID NO: 27690 - protein, 9 aa, Artificial Sequence
  Description of Artificial Sequence: Synthetic peptide
  XENP024130 vlCDR3
QQANSFPWT

SEQ ID NO: 27691 - protein, 216 aa, Artificial Sequence; identical to SEQ ID NO: 26837
  Description of Artificial Sequence: Synthetic polypeptide
  XENP024130 LOPD180[PD-1]_H1L1_Fab-[anti-ICOS]_H0L0 _scFv Light Chain

SEQ ID NO: 27692 - protein, 110 aa, Artificial Sequence; identical to SEQ ID NO: 26838
  Description of Artificial Sequence: Synthetic polypeptide
  VL of XENP024130

SEQ ID NO: 27693 - protein, 13 aa, Artificial Sequence
  Description of Artificial Sequence: Synthetic peptide
  XENP024130 vlCDR1
SGSNSNIGSNSVN

SEQ ID NO: 27694 - protein, 7 aa, Artificial Sequence
  Description of Artificial Sequence: Synthetic peptide
  XENP024130 vlCDR2
GNNQRPS

SEQ ID NO: 27695 - protein, 11 aa, Artificial Sequence
  Description of Artificial Sequence: Synthetic peptide
  XENP024130 vlCDR3
AAWDDSLNGPV

SEQ ID NO: 27696 - protein, 452 aa, Artificial Sequence; identical to SEQ ID NO: 26682
  Description of Artificial Sequence: Synthetic polypeptide
  XENP021828 GSK_314.8[ICOS]_H0L0 _Fab-1G6_L1.194_H1.279_scFv Fab-Fc Heavy Chain

SEQ ID NO: 27697 - protein, 123 aa, Artificial Sequence; identical to SEQ ID NO: 26303
  Description of Artificial Sequence: Synthetic polypeptide
  VH of XENP021828

SEQ ID NO: 27698 - protein, 5 aa, Artificial Sequence
  Description of Artificial Sequence: Synthetic peptide
  XENP021828 vhCDR1
TYWMH

SEQ ID NO: 27699 - protein, 17 aa, Artificial Sequence
  Description of Artificial Sequence: Synthetic peptide
  XENP021828 vhCDR2
EIDPSDSYVNYNQNFKG

SEQ ID NO: 27700 - protein, 14 aa, Artificial Sequence
  Description of Artificial Sequence: Synthetic peptide
  XENP021828 vhCDR3
SPDYYGTSLAWFDY

SEQ ID NO: 27701 - protein, 480 aa, Artificial Sequence; identical to SEQ ID NO: 2870
  Description of Artificial Sequence: Synthetic polypeptide
  XENP021828 GSK_314.8[ICOS]_H0L0 _Fab-1G6_L1.194_H1.279_scFv scFv-Fc Heavy Chain

SEQ ID NO: 27702 - protein, 107 aa, Artificial Sequence; identical to SEQ ID NO: 2871
  Description of Artificial Sequence: Synthetic polypeptide
  VH of XENP021828

SEQ ID NO: 27703 - protein, 122 aa, Artificial Sequence; identical to SEQ ID NO: 2872
  Description of Artificial Sequence: Synthetic polypeptide
  VL of XENP021828

SEQ ID NO: 27704 - protein, 231 aa, Artificial Sequence; identical to SEQ ID NO: 2397
  Description of Artificial Sequence: Synthetic polypeptide
  Fc chain of XENP021828

SEQ ID NO: 27705 - protein, 11 aa, Artificial Sequence
  Description of Artificial Sequence: Synthetic peptide
  XENP021828 vhCDR1
RASQSVGNDVA

SEQ ID NO: 27706 - protein, 7 aa, Artificial Sequence
  Description of Artificial Sequence: Synthetic peptide
  XENP021828 vhCDR2
YASHRYT

SEQ ID NO: 27707 - protein, 9 aa, Artificial Sequence
  Description of Artificial Sequence: Synthetic peptide
  XENP021828 vhCDR3
QQDFSSPRT

SEQ ID NO: 27708 - protein, 5 aa, Artificial Sequence
  Description of Artificial Sequence: Synthetic peptide
  XENP021828 vlCDR1
NYWMN

SEQ ID NO: 27709 - protein, 19 aa, Artificial Sequence
  Description of Artificial Sequence: Synthetic peptide
  XENP021828 vlCDR2
EIRLYSNNYATHYAESVKG

SEQ ID NO: 27710 - protein, 11 aa, Artificial Sequence
  Description of Artificial Sequence: Synthetic peptide
  XENP021828 vlCDR3
YYGNYGGYFDV

SEQ ID NO: 27711 - protein, 219 aa, Artificial Sequence; identical to SEQ ID NO: 26307
  Description of Artificial Sequence: Synthetic polypeptide
  XENP021828 GSK_314.8[ICOS]_H0L0 _Fab-1G6_L1.194_H1.279_scFv Light Chain

SEQ ID NO: 27712 - protein, 112 aa, Artificial Sequence; identical to SEQ ID NO: 26308
  Description of Artificial Sequence: Synthetic polypeptide
  VL of XENP021828

SEQ ID NO: 27713 - protein, 16 aa, Artificial Sequence
  Description of Artificial Sequence: Synthetic peptide
  XENP021828 vlCDR1
RSSKSPLHSNGNIYLY

SEQ ID NO: 27714 - protein, 7 aa, Artificial Sequence
  Description of Artificial Sequence: Synthetic peptide
  XENP021828 vlCDR2
RMSNLAS

SEQ ID NO: 27715 - protein, 9 aa, Artificial Sequence
  Description of Artificial Sequence: Synthetic peptide
  XENP021828 vlCDR3
MQHLEYPYT

SEQ ID NO: 27716 - protein, 453 aa, Artificial Sequence; identical to SEQ ID NO: 26702
  Description of Artificial Sequence: Synthetic polypeptide
  XENP021829 GSK_88.2[ICOS]_H0L0 _Fab-1G6_L1.194_H1.279_scFv Fab-Fc Heavy Chain

SEQ ID NO: 27717 - protein, 124 aa, Artificial Sequence; identical to SEQ ID NO: 26313
  Description of Artificial Sequence: Synthetic polypeptide
  VH of XENP021829

SEQ ID NO: 27718 - protein, 5 aa, Artificial Sequence
  Description of Artificial Sequence: Synthetic peptide
  XENP021829 vhCDR1
SYWIN

SEQ ID NO: 27719 - protein, 17 aa, Artificial Sequence
  Description of Artificial Sequence: Synthetic peptide
  XENP021829 vhCDR2
NIYPSDSYTNYNQMFKD

SEQ ID NO: 27720 - protein, 15 aa, Artificial Sequence
  Description of Artificial Sequence: Synthetic peptide
  XENP021829 vhCDR3
WNLSYYFDNNYYLDY

SEQ ID NO: 27721 - protein, 480 aa, Artificial Sequence; identical to SEQ ID NO: 2870
  Description of Artificial Sequence: Synthetic polypeptide
  XENP021829 GSK_88.2[ICOS]_H0L0 _Fab-1G6_L1.194_H1.279_scFv scFv-Fc Heavy Chain

SEQ ID NO: 27722 - protein, 107 aa, Artificial Sequence; identical to SEQ ID NO: 2871
  Description of Artificial Sequence: Synthetic polypeptide
  VH of XENP021829

SEQ ID NO: 27723 - protein, 122 aa, Artificial Sequence; identical to SEQ ID NO: 2872
  Description of Artificial Sequence: Synthetic polypeptide
  VL of XENP021829

SEQ ID NO: 27724 - protein, 231 aa, Artificial Sequence; identical to SEQ ID NO: 2397
  Description of Artificial Sequence: Synthetic polypeptide
  Fc chain of XENP021829

SEQ ID NO: 27725 - protein, 11 aa, Artificial Sequence
  Description of Artificial Sequence: Synthetic peptide
  XENP021829 vhCDR1
RASQSVGNDVA

SEQ ID NO: 27726 - protein, 7 aa, Artificial Sequence
  Description of Artificial Sequence: Synthetic peptide
  XENP021829 vhCDR2
YASHRYT

SEQ ID NO: 27727 - protein, 9 aa, Artificial Sequence
  Description of Artificial Sequence: Synthetic peptide
  XENP021829 vhCDR3
QQDFSSPRT

SEQ ID NO: 27728 - protein, 5 aa, Artificial Sequence
  Description of Artificial Sequence: Synthetic peptide
  XENP021829 vlCDR1
NYWMN

SEQ ID NO: 27729 - protein, 19 aa, Artificial Sequence
  Description of Artificial Sequence: Synthetic peptide
  XENP021829 vlCDR2
EIRLYSNNYATHYAESVKG

SEQ ID NO: 27730 - protein, 11 aa, Artificial Sequence
  Description of Artificial Sequence: Synthetic peptide
  XENP021829 vlCDR3
YYGNYGGYFDV

SEQ ID NO: 27731 - protein, 219 aa, Artificial Sequence; identical to SEQ ID NO: 26317
  Description of Artificial Sequence: Synthetic polypeptide
  XENP021829 GSK_88.2[ICOS]_H0L0 _Fab-1G6_L1.194_H1.279_scFv Light Chain

SEQ ID NO: 27732 - protein, 112 aa, Artificial Sequence; identical to SEQ ID NO: 26318
  Description of Artificial Sequence: Synthetic polypeptide
  VL of XENP021829

SEQ ID NO: 27733 - protein, 16 aa, Artificial Sequence
  Description of Artificial Sequence: Synthetic peptide
  XENP021829 vlCDR1
RSSKSLLHSNGNTYLY

SEQ ID NO: 27734 - protein, 7 aa, Artificial Sequence
  Description of Artificial Sequence: Synthetic peptide
  XENP021829 vlCDR2
RMSNLAS

SEQ ID NO: 27735 - protein, 9 aa, Artificial Sequence
  Description of Artificial Sequence: Synthetic peptide
  XENP021829 vlCDR3
MQHLEYPWT

SEQ ID NO: 27736 - protein, 454 aa, Artificial Sequence; identical to SEQ ID NO: 26722
  Description of Artificial Sequence: Synthetic polypeptide
  XENP021830 jMab-138[ICOS]_H0L0 _Fab-1G6_L1.194_H1.279_scFv Fab-Fc Heavy Chain

SEQ ID NO: 27737 - protein, 125 aa, Artificial Sequence; identical to SEQ ID NO: 26323
  Description of Artificial Sequence: Synthetic polypeptide
  VH of XENP021830

SEQ ID NO: 27738 - protein, 5 aa, Artificial Sequence
  Description of Artificial Sequence: Synthetic peptide
  XENP021830 vhCDR1
SYDMH

SEQ ID NO: 27739 - protein, 16 aa, Artificial Sequence
  Description of Artificial Sequence: Synthetic peptide
  XENP021830 vhCDR2
AIGTAGDTYYPGSVKG

SEQ ID NO: 27740 - protein, 17 aa, Artificial Sequence
  Description of Artificial Sequence: Synthetic peptide
  XENP021830 vhCDR3
DNRKVTHEHYYYYGMDV

SEQ ID NO: 27741 - protein, 480 aa, Artificial Sequence; identical to SEQ ID NO: 2870
  Description of Artificial Sequence: Synthetic polypeptide
  XENP021830 jMab-138[ICOS]_H0L0 _Fab-1G6_L1.194_H1.279_scFv scFv-Fc Heavy Chain

SEQ ID NO: 27742 - protein, 107 aa, Artificial Sequence; identical to SEQ ID NO: 2871
  Description of Artificial Sequence: Synthetic polypeptide
  VH of XENP021830

SEQ ID NO: 27743 - protein, 122 aa, Artificial Sequence; identical to SEQ ID NO: 2872
  Description of Artificial Sequence: Synthetic polypeptide
  VL of XENP021830

SEQ ID NO: 27744 - protein, 231 aa, Artificial Sequence; identical to SEQ ID NO: 2397
  Description of Artificial Sequence: Synthetic polypeptide
  Fc chain of XENP021830

SEQ ID NO: 27745 - protein, 11 aa, Artificial Sequence
  Description of Artificial Sequence: Synthetic peptide
  XENP021830 vhCDR1
RASQSVGNDVA

SEQ ID NO: 27746 - protein, 7 aa, Artificial Sequence
  Description of Artificial Sequence: Synthetic peptide
  XENP021830 vhCDR2
YASHRYT

SEQ ID NO: 27747 - protein, 9 aa, Artificial Sequence
  Description of Artificial Sequence: Synthetic peptide
  XENP021830 vhCDR3
QQDFSSPRT

SEQ ID NO: 27748 - protein, 5 aa, Artificial Sequence
  Description of Artificial Sequence: Synthetic peptide
  XENP021830 vlCDR1
NYWMN

SEQ ID NO: 27749 - protein, 19 aa, Artificial Sequence
  Description of Artificial Sequence: Synthetic peptide
  XENP021830 vlCDR2
EIRLYSNNYATHYAESVKG

SEQ ID NO: 27750 - protein, 11 aa, Artificial Sequence
  Description of Artificial Sequence: Synthetic peptide
  XENP021830 vlCDR3
YYGNYGGYFDV

SEQ ID NO: 27751 - protein, 216 aa, Artificial Sequence; identical to SEQ ID NO: 26327
  Description of Artificial Sequence: Synthetic polypeptide
  XENP021830 jMab-138[ICOS]_H0L0 _Fab-1G6_L1.194_H1.279_scFv Light Chain

SEQ ID NO: 27752 - protein, 109 aa, Artificial Sequence; identical to SEQ ID NO: 26328
  Description of Artificial Sequence: Synthetic polypeptide
  VL of XENP021830

SEQ ID NO: 27753 - protein, 12 aa, Artificial Sequence
  Description of Artificial Sequence: Synthetic peptide
  XENP021830 vlCDR1
RASQNIRSSYLA

SEQ ID NO: 27754 - protein, 7 aa, Artificial Sequence
  Description of Artificial Sequence: Synthetic peptide
  XENP021830 vlCDR2
GASSRAT

SEQ ID NO: 27755 - protein, 10 aa, Artificial Sequence
  Description of Artificial Sequence: Synthetic peptide
  XENP021830 vlCDR3
QQFGSSPMCS

SEQ ID NO: 27756 - protein, 454 aa, Artificial Sequence; identical to SEQ ID NO: 26742
  Description of Artificial Sequence: Synthetic polypeptide
  XENP021831 jMab-139[ICOS]_H0L0 _Fab-1G6_L1.194_H1.279_scFv Fab-Fc Heavy Chain

SEQ ID NO: 27757 - protein, 125 aa, Artificial Sequence; identical to SEQ ID NO: 26333
  Description of Artificial Sequence: Synthetic polypeptide
  VH of XENP021831

SEQ ID NO: 27758 - protein, 5 aa, Artificial Sequence
  Description of Artificial Sequence: Synthetic peptide
  XENP021831 vhCDR1
SYDMH

SEQ ID NO: 27759 - protein, 16 aa, Artificial Sequence
  Description of Artificial Sequence: Synthetic peptide
  XENP021831 vhCDR2
AIGTAGDTYYPGSVKG

SEQ ID NO: 27760 - protein, 17 aa, Artificial Sequence
  Description of Artificial Sequence: Synthetic peptide
  XENP021831 vhCDR3
DKRTVTHEHYYYYGMDV

SEQ ID NO: 27761 - protein, 480 aa, Artificial Sequence; identical to SEQ ID NO: 2870
  Description of Artificial Sequence: Synthetic polypeptide
  XENP021831 jMab-139[ICOS]_H0L0 _Fab-1G6_L1.194_H1.279_scFv scFv-Fc Heavy Chain

SEQ ID NO: 27762 - protein, 107 aa, Artificial Sequence; identical to SEQ ID NO: 2871
  Description of Artificial Sequence: Synthetic polypeptide
  VH of XENP021831

SEQ ID NO: 27763 - protein, 122 aa, Artificial Sequence; identical to SEQ ID NO: 2872
  Description of Artificial Sequence: Synthetic polypeptide
  VL of XENP021831

SEQ ID NO: 27764 - protein, 231 aa, Artificial Sequence; identical to SEQ ID NO: 2397
  Description of Artificial Sequence: Synthetic polypeptide
  Fc chain of XENP021831

SEQ ID NO: 27765 - protein, 11 aa, Artificial Sequence
  Description of Artificial Sequence: Synthetic peptide
  XENP021831 vhCDR1
RASQSVGNDVA

SEQ ID NO: 27766 - protein, 7 aa, Artificial Sequence
  Description of Artificial Sequence: Synthetic peptide
  XENP021831 vhCDR2
YASHRYT

SEQ ID NO: 27767 - protein, 9 aa, Artificial Sequence
  Description of Artificial Sequence: Synthetic peptide
  XENP021831 vhCDR3
QQDFSSPRT

SEQ ID NO: 27768 - protein, 5 aa, Artificial Sequence
  Description of Artificial Sequence: Synthetic peptide
  XENP021831 vlCDR1
NYWMN

SEQ ID NO: 27769 - protein, 19 aa, Artificial Sequence
  Description of Artificial Sequence: Synthetic peptide
  XENP021831 vlCDR2
EIRLYSNNYATHYAESVKG

SEQ ID NO: 27770 - protein, 11 aa, Artificial Sequence
  Description of Artificial Sequence: Synthetic peptide
  XENP021831 vlCDR3
YYGNYGGYFDV

SEQ ID NO: 27771 - protein, 216 aa, Artificial Sequence; identical to SEQ ID NO: 26337
  Description of Artificial Sequence: Synthetic polypeptide
  XENP021831 jMab-139[ICOS]_H0L0 _Fab-1G6_L1.194_H1.279_scFv Light Chain

SEQ ID NO: 27772 - protein, 109 aa, Artificial Sequence; identical to SEQ ID NO: 26338
  Description of Artificial Sequence: Synthetic polypeptide
  VL of XENP021831

SEQ ID NO: 27773 - protein, 12 aa, Artificial Sequence
  Description of Artificial Sequence: Synthetic peptide
  XENP021831 vlCDR1
RASQSISSSSLA

SEQ ID NO: 27774 - protein, 7 aa, Artificial Sequence
  Description of Artificial Sequence: Synthetic peptide
  XENP021831 vlCDR2
GASSRAT

SEQ ID NO: 27775 - protein, 10 aa, Artificial Sequence
  Description of Artificial Sequence: Synthetic peptide
  XENP021831 vlCDR3
QQFGSSPMCS

SEQ ID NO: 27776 - protein, 450 aa, Artificial Sequence; identical to SEQ ID NO: 26762
  Description of Artificial Sequence: Synthetic polypeptide
  XENP022348 WO2016059602_GSK_H0L0 _Fab-1G6_L1.194_H1.279_scFv Fab-Fc Heavy Chain

SEQ ID NO: 27777 - protein, 121 aa, Artificial Sequence; identical to SEQ ID NO: 26343
  Description of Artificial Sequence: Synthetic polypeptide
  VH of XENP022348

SEQ ID NO: 27778 - protein, 5 aa, Artificial Sequence
  Description of Artificial Sequence: Synthetic peptide
  XENP022348 vhCDR1
DYAMH

SEQ ID NO: 27779 - protein, 17 aa, Artificial Sequence
  Description of Artificial Sequence: Synthetic peptide
  XENP022348 vhCDR2
LISIYSDHTNYNQKFQG

SEQ ID NO: 27780 - protein, 12 aa, Artificial Sequence
  Description of Artificial Sequence: Synthetic peptide
  XENP022348 vhCDR3
NNYGNYGWYFDV

SEQ ID NO: 27781 - protein, 480 aa, Artificial Sequence; identical to SEQ ID NO: 2870
  Description of Artificial Sequence: Synthetic polypeptide
  XENP022348 WO2016059602_GSK_H0L0 _Fab-1G6_L1.194_H1.279_scFv scFv-Fc Heavy Chain

SEQ ID NO: 27782 - protein, 107 aa, Artificial Sequence; identical to SEQ ID NO: 2871
  Description of Artificial Sequence: Synthetic polypeptide
  VH of XENP022348

SEQ ID NO: 27783 - protein, 122 aa, Artificial Sequence; identical to SEQ ID NO: 2872
  Description of Artificial Sequence: Synthetic polypeptide
  VL of XENP022348

SEQ ID NO: 27784 - protein, 231 aa, Artificial Sequence; identical to SEQ ID NO: 2397
  Description of Artificial Sequence: Synthetic polypeptide
  Fc chain of XENP022348

SEQ ID NO: 27785 - protein, 11 aa, Artificial Sequence
  Description of Artificial Sequence: Synthetic peptide
  XENP022348 vhCDR1
RASQSVGNDVA

SEQ ID NO: 27786 - protein, 7 aa, Artificial Sequence
  Description of Artificial Sequence: Synthetic peptide
  XENP022348 vhCDR2
YASHRYT

SEQ ID NO: 27787 - protein, 9 aa, Artificial Sequence
  Description of Artificial Sequence: Synthetic peptide
  XENP022348 vhCDR3
QQDFSSPRT

SEQ ID NO: 27788 - protein, 5 aa, Artificial Sequence
  Description of Artificial Sequence: Synthetic peptide
  XENP022348 vlCDR1
NYWMN

SEQ ID NO: 27789 - protein, 19 aa, Artificial Sequence
  Description of Artificial Sequence: Synthetic peptide
  XENP022348 vlCDR2
EIRLYSNNYATHYAESVKG

SEQ ID NO: 27790 - protein, 11 aa, Artificial Sequence
  Description of Artificial Sequence: Synthetic peptide
  XENP022348 vlCDR3
YYGNYGGYFDV

SEQ ID NO: 27791 - protein, 213 aa, Artificial Sequence; identical to SEQ ID NO: 26347
  Description of Artificial Sequence: Synthetic polypeptide
  XENP022348 WO2016059602_GSK_H0L0 _Fab-1G6_L1.194_H1.279_scFv Light Chain

SEQ ID NO: 27792 - protein, 106 aa, Artificial Sequence; identical to SEQ ID NO: 26348
  Description of Artificial Sequence: Synthetic polypeptide
  VL of XENP022348

SEQ ID NO: 27793 - protein, 10 aa, Artificial Sequence
  Description of Artificial Sequence: Synthetic peptide
  XENP022348 vlCDR1
SASSSVSYMH

SEQ ID NO: 27794 - protein, 7 aa, Artificial Sequence
  Description of Artificial Sequence: Synthetic peptide
  XENP022348 vlCDR2
DTSKLAS

SEQ ID NO: 27795 - protein, 9 aa, Artificial Sequence
  Description of Artificial Sequence: Synthetic peptide
  XENP022348 vlCDR3
FQGSGYPYT

SEQ ID NO: 27796 - protein, 447 aa, Artificial Sequence; identical to SEQ ID NO: 27117
  Description of Artificial Sequence: Synthetic polypeptide
  XENP021748 YW243.55.S70[PD-L1]_H0L0 _Fab-[anti-ICOS]_H0L0 _scFv Fab-Fc Heavy Chain

SEQ ID NO: 27797 - protein, 118 aa, Artificial Sequence [sequence omitted]

SEQ ID NO: 27798 - protein, 5 aa, Artificial Sequence
  Description of Artificial Sequence: Synthetic peptide
  XENP021748 vhCDR1
DSWIH

SEQ ID NO: 27799 - protein, 17 aa, Artificial Sequence
  Description of Artificial Sequence: Synthetic peptide
  XENP021748 vhCDR2
WISPYGGSTYYADSVKG

SEQ ID NO: 27800 - protein, 9 aa, Artificial Sequence
  Description of Artificial Sequence: Synthetic peptide
  XENP021748 vhCDR3
RHWPGGFDY

SEQ ID NO: 27801 - protein, 483 aa, Artificial Sequence; identical to SEQ ID NO: 26827
  Description of Artificial Sequence: Synthetic polypeptide
  XENP021748 YW243.55.S70[PD-L1]_H0L0 _Fab-[anti-ICOS]_H0L0_scFv scFv-Fc Heavy Chain

SEQ ID NO: 27802 - protein, 125 aa, Artificial Sequence; identical to SEQ ID NO: 26293
  Description of Artificial Sequence: Synthetic polypeptide
  VH of XENP021748

SEQ ID NO: 27803 - protein, 107 aa, Artificial Sequence; identical to SEQ ID NO: 26298
  Description of Artificial Sequence: Synthetic polypeptide
  VL of XENP021748

SEQ ID NO: 27804 - protein, 231 aa, Artificial Sequence; identical to SEQ ID NO: 2397
  Description of Artificial Sequence: Synthetic polypeptide
  Fc chain of XENP021748

SEQ ID NO: 27805 - protein, 5 aa, Artificial Sequence
  Description of Artificial Sequence: Synthetic peptide
  XENP021748 vhCDR1
GYYMH

SEQ ID NO: 27806 - protein, 17 aa, Artificial Sequence
  Description of Artificial Sequence: Synthetic peptide
  XENP021748 vhCDR2
WINPHSGGTNYAQKFQG

SEQ ID NO: 27807 - protein, 16 aa, Artificial Sequence
  Description of Artificial Sequence: Synthetic peptide
  XENP021748 vhCDR3
TYYYDSSGYYHDAFDI

SEQ ID NO: 27808 - protein, 11 aa, Artificial Sequence
  Description of Artificial Sequence: Synthetic peptide
  XENP021748 vlCDR1
RASQGISRLLA

SEQ ID NO: 27809 - protein, 7 aa, Artificial Sequence
  Description of Artificial Sequence: Synthetic peptide
  XENP021748 vlCDR2
VASSLQS

SEQ ID NO: 27810 - protein, 9 aa, Artificial Sequence
  Description of Artificial Sequence: Synthetic peptide
  XENP021748 vlCDR3
QQANSFPWT

SEQ ID NO: 27811 - protein, 214 aa, Artificial Sequence; identical to SEQ ID NO: 27132
  Description of Artificial Sequence: Synthetic polypeptide
  XENP021748 YW243.55.S70[PD-L1]_H0L0 _Fab-[anti-ICOS]_H0L0_scFv Light Chain

SEQ ID NO: 27812 - protein, 107 aa, Artificial Sequence [sequence omitted]

SEQ ID NO: 27813 - protein, 11 aa, Artificial Sequence
  Description of Artificial Sequence: Synthetic peptide
  XENP021748 vlCDR1
RASQDVSTAVA

SEQ ID NO: 27814 - protein, 7 aa, Artificial Sequence
  Description of Artificial Sequence: Synthetic peptide
  XENP021748 vlCDR2
SASFLYS

SEQ ID NO: 27815 - protein, 9 aa, Artificial Sequence
  Description of Artificial Sequence: Synthetic peptide
  XENP021748 vlCDR3
QQYLYHPAT

SEQ ID NO: 27816 - protein, 454 aa, Artificial Sequence; identical to SEQ ID NO: 26442
  Description of Artificial Sequence: Synthetic polypeptide
  XENP021749 [anti-ICOS]_H0L0 _Fab-[anti-CTLA-4]_H3.23_L0.129_scFv Fab-Fc Heavy Chain

SEQ ID NO: 27817 - protein, 125 aa, Artificial Sequence; identical to SEQ ID NO: 26293
  Description of Artificial Sequence: Synthetic polypeptide
  VH of XENP021749

SEQ ID NO: 27818 - protein, 5 aa, Artificial Sequence
  Description of Artificial Sequence: Synthetic peptide
  XENP021749 vhCDR1
GYYMH

SEQ ID NO: 27819 - protein, 17 aa, Artificial Sequence
  Description of Artificial Sequence: Synthetic peptide
  XENP021749 vhCDR2
WINPHSGGTNYAQKFQG

SEQ ID NO: 27820 - protein, 16 aa, Artificial Sequence
  Description of Artificial Sequence: Synthetic peptide
  XENP021749 vhCDR3
TYYYDSSGYYHDAFDI

SEQ ID NO: 27821 - protein, 477 aa, Artificial Sequence; identical to SEQ ID NO: 2394
  Description of Artificial Sequence: Synthetic polypeptide
  XENP021749 [anti-ICOS]_H0L0 _Fab-[anti-CTLA-4]_H3.23_L0.129_scFv scFv-Fc Heavy Chain

SEQ ID NO: 27822 - protein, 118 aa, Artificial Sequence; identical to SEQ ID NO: 2395
  Description of Artificial Sequence: Synthetic polypeptide
  VH of XENP021749

SEQ ID NO: 27823 - protein, 108 aa, Artificial Sequence; identical to SEQ ID NO: 2396
  Description of Artificial Sequence: Synthetic polypeptide
  VL of XENP021749

SEQ ID NO: 27824 - protein, 231 aa, Artificial Sequence; identical to SEQ ID NO: 2397
  Description of Artificial Sequence: Synthetic polypeptide
  Fc chain of XENP021749

SEQ ID NO: 27825 - protein, 5 aa, Artificial Sequence
  Description of Artificial Sequence: Synthetic peptide
  XENP021749 vhCDR1
SYTMH

SEQ ID NO: 27826 - protein, 17 aa, Artificial Sequence
  Description of Artificial Sequence: Synthetic peptide
  XENP021749 vhCDR2
FISYDGNYKYYADSVKG

SEQ ID NO: 27827 - protein, 9 aa, Artificial Sequence
  Description of Artificial Sequence: Synthetic peptide
  XENP021749 vhCDR3
GGHLGPFDL

SEQ ID NO: 27828 - protein, 12 aa, Artificial Sequence
  Description of Artificial Sequence: Synthetic peptide
  XENP021749 vlCDR1
RASQSVGSSYLA

SEQ ID NO: 27829 - protein, 7 aa, Artificial Sequence
  Description of Artificial Sequence: Synthetic peptide
  XENP021749 vlCDR2
GASSRAT

SEQ ID NO: 27830 - protein, 9 aa, Artificial Sequence
  Description of Artificial Sequence: Synthetic peptide
  XENP021749 vlCDR3
QQYGSSPWT

SEQ ID NO: 27831 - protein, 214 aa, Artificial Sequence; identical to SEQ ID NO: 26297
  Description of Artificial Sequence: Synthetic polypeptide
  XENP021749 [anti-ICOS]_H0L0 _Fab-[anti-CTLA-4]_H3.23_L0.129_scFv Light Chain

SEQ ID NO: 27832 - protein, 107 aa, Artificial Sequence; identical to SEQ ID NO: 26298
  Description of Artificial Sequence: Synthetic polypeptide
  VL of XENP021749

SEQ ID NO: 27833 - protein, 11 aa, Artificial Sequence
  Description of Artificial Sequence: Synthetic peptide
  XENP021749 vlCDR1
RASQGISRLLA

SEQ ID NO: 27834 - protein, 7 aa, Artificial Sequence
  Description of Artificial Sequence: Synthetic peptide
  XENP021749 vlCDR2
VASSLQS

SEQ ID NO: 27835 - protein, 9 aa, Artificial Sequence
  Description of Artificial Sequence: Synthetic peptide
  XENP021749 vlCDR3
QQANSFPWT

SEQ ID NO: 27836 - protein, 452 aa, Artificial Sequence; identical to SEQ ID NO: 26682
  Description of Artificial Sequence: Synthetic polypeptide
  XENP021861 GSK_314.8[ICOS]_H0L0 one-arm mAb Fab-Fc Heavy Chain

SEQ ID NO: 27837 - protein, 123 aa, Artificial Sequence; identical to SEQ ID NO: 26303
  Description of Artificial Sequence: Synthetic polypeptide
  VH of XENP021861

SEQ ID NO: 27838 - protein, 5 aa, Artificial Sequence
  Description of Artificial Sequence: Synthetic peptide
  XENP021861 vhCDR1
TYWMH

SEQ ID NO: 27839 - protein, 17 aa, Artificial Sequence
  Description of Artificial Sequence: Synthetic peptide
  XENP021861 vhCDR2
EIDPSDSYVNYNQNFKG

SEQ ID NO: 27840 - protein, 14 aa, Artificial Sequence
  Description of Artificial Sequence: Synthetic peptide
  XENP021861 vhCDR3
SPDYYGTSLAWFDY

SEQ ID NO: 27841 - protein, 231 aa, Artificial Sequence; identical to SEQ ID NO: 27198
  Description of Artificial Sequence: Synthetic polypeptide
  XENP021861 GSK_314.8[ICOS]_H0L0 one-arm mAb Fc-only Heavy Chain

SEQ ID NO: 27842 - protein, 219 aa, Artificial Sequence; identical to SEQ ID NO: 26307
  Description of Artificial Sequence: Synthetic polypeptide
  XENP021861 GSK_314.8[ICOS]_H0L0 one-arm mAb Light Chain

SEQ ID NO: 27843 - protein, 112 aa, Artificial Sequence; identical to SEQ ID NO: 26308
  Description of Artificial Sequence: Synthetic polypeptide
  VL of XENP021861

SEQ ID NO: 27844 - protein, 16 aa, Artificial Sequence
  Description of Artificial Sequence: Synthetic peptide
  XENP021861 vlCDR1
RSSKSPLHSNGNIYLY

SEQ ID NO: 27845 - protein, 7 aa, Artificial Sequence
  Description of Artificial Sequence: Synthetic peptide
  XENP021861 vlCDR2
RMSNLAS

SEQ ID NO: 27846 - protein, 9 aa, Artificial Sequence
  Description of Artificial Sequence: Synthetic peptide
  XENP021861 vlCDR3
MQHLEYPYT

SEQ ID NO: 27847 - protein, 454 aa, Artificial Sequence; identical to SEQ ID NO: 26722
  Description of Artificial Sequence: Synthetic polypeptide
  XENP021863 jMab-138[ICOS]_H0L0 one-arm mAb Fab-Fc Heavy Chain

SEQ ID NO: 27848 - protein, 125 aa, Artificial Sequence; identical to SEQ ID NO: 26323
  Description of Artificial Sequence: Synthetic polypeptide
  VH of XENP021863

SEQ ID NO: 27849 - protein, 5 aa, Artificial Sequence
  Description of Artificial Sequence: Synthetic peptide
  XENP021863 vhCDR1
SYDMH

SEQ ID NO: 27850 - protein, 16 aa, Artificial Sequence
  Description of Artificial Sequence: Synthetic peptide
  XENP021863 vhCDR2
AIGTAGDTYYPGSVKG

SEQ ID NO: 27851 - protein, 17 aa, Artificial Sequence
  Description of Artificial Sequence: Synthetic peptide
  XENP021863 vhCDR3
DNRKVTHEHYYYYGMDV

SEQ ID NO: 27852 - protein, 231 aa, Artificial Sequence; identical to SEQ ID NO: 27198
  Description of Artificial Sequence: Synthetic polypeptide
  XENP021863 jMab-138[ICOS]_H0L0 one-arm mAb Fc-only Heavy Chain

SEQ ID NO: 27853 - protein, 216 aa, Artificial Sequence; identical to SEQ ID NO: 26327
  Description of Artificial Sequence: Synthetic polypeptide
  XENP021863 jMab-138[ICOS]_H0L0 one-arm mAb Light Chain

SEQ ID NO: 27854 - protein, 109 aa, Artificial Sequence; identical to SEQ ID NO: 26328
  Description of Artificial Sequence: Synthetic polypeptide
  VL of XENP021863

SEQ ID NO: 27855 - protein, 12 aa, Artificial Sequence
  Description of Artificial Sequence: Synthetic peptide
  XENP021863 vlCDR1
RASQNIRSSYLA

SEQ ID NO: 27856 - protein, 7 aa, Artificial Sequence
  Description of Artificial Sequence: Synthetic peptide
  XENP021863 vlCDR2
GASSRAT

SEQ ID NO: 27857 - protein, 10 aa, Artificial Sequence
  Description of Artificial Sequence: Synthetic peptide
  XENP021863 vlCDR3
QQFGSSPMCS

SEQ ID NO: 27858 - protein, 450 aa, Artificial Sequence; identical to SEQ ID NO: 26762
  Description of Artificial Sequence: Synthetic polypeptide
  XENP022349 WO2016059602[ICOS]_GSK_H0L0 one-arm mAb Fab-Fc Heavy Chain

SEQ ID NO: 27859 - protein, 121 aa, Artificial Sequence; identical to SEQ ID NO: 26343
  Description of Artificial Sequence: Synthetic polypeptide
  VH of XENP022349

SEQ ID NO: 27860 - protein, 5 aa, Artificial Sequence
  Description of Artificial Sequence: Synthetic peptide
  XENP022349 vhCDR1
DYAMH

SEQ ID NO: 27861 - protein, 17 aa, Artificial Sequence
  Description of Artificial Sequence: Synthetic peptide
  XENP022349 vhCDR2
LISIYSDHTNYNQKFQG

SEQ ID NO: 27862 - protein, 12 aa, Artificial Sequence
  Description of Artificial Sequence: Synthetic peptide
  XENP022349 vhCDR3
NNYGNYGWYFDV

SEQ ID NO: 27863 - protein, 231 aa, Artificial Sequence; identical to SEQ ID NO: 27198
  Description of Artificial Sequence: Synthetic polypeptide
  XENP022349 WO2016059602[ICOS]_GSK_H0L0 one-arm mAb Fc-only Heavy Chain

SEQ ID NO: 27864 - protein, 213 aa, Artificial Sequence; identical to SEQ ID NO: 26347
  Description of Artificial Sequence: Synthetic polypeptide
  XENP022349 WO2016059602[ICOS]_GSK_H0L0 one-arm mAb Light Chain

SEQ ID NO: 27865 - protein, 106 aa, Artificial Sequence; identical to SEQ ID NO: 26348
  Description of Artificial Sequence: Synthetic polypeptide
  VL of XENP022349

SEQ ID NO: 27866 - protein, 10 aa, Artificial Sequence
  Description of Artificial Sequence: Synthetic peptide
  XENP022349 vlCDR1
SASSSVSYMH

SEQ ID NO: 27867 - protein, 7 aa, Artificial Sequence
  Description of Artificial Sequence: Synthetic peptide
  XENP022349 vlCDR2
DTSKLAS

SEQ ID NO: 27868 - protein, 9 aa, Artificial Sequence
  Description of Artificial Sequence: Synthetic peptide
  XENP022349 vlCDR3
FQGSGYPYT

SEQ ID NO: 27869 - protein, 230 aa, Artificial Sequence
  Description of Artificial Sequence: Synthetic polypeptide
  XENP022050 [ICOS]_H0L0 _Fab_His Heavy Chain
QVQLVQSGAEVKKPGASVKVSCKASGYTFTGYYMHWVRQAPGQGLEWMGWINPHSGGTNYAQKFQGRVTMTRDTSISTAYMELSRLRSDDTAVYYCARTYYYDSSGYYHDAFDIWGQGTMVTVSSASTKGPSVFPLAPSSKSTSGGTAALGCLVKDYFPEPVTVSWNSGALTSGVHTFPAVLQSSGLYSLSSVVTVPSSSLGTQTYICNVNHKPSNTKVDKKVEPKSCGS

SEQ ID NO: 27870 - protein, 214 aa, Artificial Sequence; identical to SEQ ID NO: 26297
  Description of Artificial Sequence: Synthetic polypeptide
  XENP022050 [ICOS]_H0L0 _Fab_His Light Chain

SEQ ID NO: 27871 - protein, 230 aa, Artificial Sequence
  Description of Artificial Sequence: Synthetic polypeptide
  XENP022051 [ICOS]_H0.1_L0_Fab_His Heavy Chain
QVQLVQSGAEVKKPGASVKVSCKASGYTFTEYYMHWVRQAPGQGLEWMGWINPHSGGTNYAQKFQGRVTMTRDTSISTAYMELSRLRSDDTAVYYCARTYYYDSSGYYHDAFDIWGQGTMVTVSSASTKGPSVFPLAPSSKSTSGGTAALGCLVKDYFPEPVTVSWNSGALTSGVHTFPAVLQSSGLYSLSSVVTVPSSSLGTQTYICNVNHKPSNTKVDKKVEPKSCGS

SEQ ID NO: 27872 - protein, 214 aa, Artificial Sequence; identical to SEQ ID NO: 26297
  Description of Artificial Sequence: Synthetic polypeptide
  XENP022051 [ICOS]_H0.1_L0_Fab_His Light Chain

SEQ ID NO: 27873 - protein, 230 aa, Artificial Sequence
  Description of Artificial Sequence: Synthetic polypeptide
  XENP022052 [ICOS]_H0.2_L0_Fab_His Heavy Chain
QVQLVQSGAEVKKPGASVKVSCKASGYTFTSYYMHWVRQAPGQGLEWMGWINPHSGGTNYAQKFQGRVTMTRDTSISTAYMELSRLRSDDTAVYYCARTYYYDSSGYYHDAFDIWGQGTMVTVSSASTKGPSVFPLAPSSKSTSGGTAALGCLVKDYFPEPVTVSWNSGALTSGVHTFPAVLQSSGLYSLSSVVTVPSSSLGTQTYICNVNHKPSNTKVDKKVEPKSCGS

SEQ ID NO: 27874 - protein, 214 aa, Artificial Sequence; identical to SEQ ID NO: 26297
  Description of Artificial Sequence: Synthetic polypeptide
  XENP022052 [ICOS]_H0.2_L0_Fab_His Light Chain

SEQ ID NO: 27875 - protein, 230 aa, Artificial Sequence
  Description of Artificial Sequence: Synthetic polypeptide
  XENP022053 [ICOS]_H0.3_L0_Fab_His Heavy Chain
QVQLVQSGAEVKKPGASVKVSCKASGYTFTGYYMHWVRQAPGQGLEWMGIINPHSGGTNYAQKFQGRVTMTRDTSISTAYMELSRLRSDDTAVYYCARTYYYDSSGYYHDAFDIWGQGTMVTVSSASTKGPSVFPLAPSSKSTSGGTAALGCLVKDYFPEPVTVSWNSGALTSGVHTFPAVLQSSGLYSLSSVVTVPSSSLGTQTYICNVNHKPSNTKVDKKVEPKSCGS

SEQ ID NO: 27876 - protein, 214 aa, Artificial Sequence; identical to SEQ ID NO: 26297
  Description of Artificial Sequence: Synthetic polypeptide
  XENP022053 [ICOS]_H0.3_L0_Fab_His Light Chain

SEQ ID NO: 27877 - protein, 230 aa, Artificial Sequence
  Description of Artificial Sequence: Synthetic polypeptide
  XENP022054 [ICOS]_H0.4_L0_Fab_His Heavy Chain
QVQLVQSGAEVKKPGASVKVSCKASGYTFTGYYMHWVRQAPGQGLEWMGWINPESGGTNYAQKFQGRVTMTRDTSISTAYMELSRLRSDDTAVYYCARTYYYDSSGYYHDAFDIWGQGTMVTVSSASTKGPSVFPLAPSSKSTSGGTAALGCLVKDYFPEPVTVSWNSGALTSGVHTFPAVLQSSGLYSLSSVVTVPSSSLGTQTYICNVNHKPSNTKVDKKVEPKSCGS

SEQ ID NO: 27878 - protein, 214 aa, Artificial Sequence; identical to SEQ ID NO: 26297
  Description of Artificial Sequence: Synthetic polypeptide
  XENP022054 [ICOS]_H0.4_L0_Fab_His Light Chain

SEQ ID NO: 27879 - protein, 230 aa, Artificial Sequence
  Description of Artificial Sequence: Synthetic polypeptide
  XENP022055 [ICOS]_H0.5_L0_Fab_His Heavy Chain
QVQLVQSGAEVKKPGASVKVSCKASGYTFTGYYMHWVRQAPGQGLEWMGWINPSSGGTNYAQKFQGRVTMTRDTSISTAYMELSRLRSDDTAVYYCARTYYYDSSGYYHDAFDIWGQGTMVTVSSASTKGPSVFPLAPSSKSTSGGTAALGCLVKDYFPEPVTVSWNSGALTSGVHTFPAVLQSSGLYSLSSVVTVPSSSLGTQTYICNVNHKPSNTKVDKKVEPKSCGS

SEQ ID NO: 27880 - protein, 214 aa, Artificial Sequence; identical to SEQ ID NO: 26297
  Description of Artificial Sequence: Synthetic polypeptide
  XENP022055 [ICOS]_H0.5_L0_Fab_His Light Chain

SEQ ID NO: 27881 - protein, 230 aa, Artificial Sequence
  Description of Artificial Sequence: Synthetic polypeptide
  XENP022056 [ICOS]_H0.6_L0_Fab_His Heavy Chain
QVQLVQSGAEVKKPGASVKVSCKASGYTFTGYYMHWVRQAPGQGLEWMGWINPHGGGTNYAQKFQGRVTMTRDTSISTAYMELSRLRSDDTAVYYCARTYYYDSSGYYHDAFDIWGQGTMVTVSSASTKGPSVFPLAPSSKSTSGGTAALGCLVKDYFPEPVTVSWNSGALTSGVHTFPAVLQSSGLYSLSSVVTVPSSSLGTQTYICNVNHKPSNTKVDKKVEPKSCGS

SEQ ID NO: 27882 - protein, 214 aa, Artificial Sequence; identical to SEQ ID NO: 26297
  Description of Artificial Sequence: Synthetic polypeptide
  XENP022056 [ICOS]_H0.6_L0_Fab_His Light Chain

SEQ ID NO: 27883 - protein, 230 aa, Artificial Sequence
  Description of Artificial Sequence: Synthetic polypeptide
  XENP022057 [ICOS]_H0.7_L0_Fab_His Heavy Chain
QVQLVQSGAEVKKPGASVKVSCKASGYTFTGYYMHWVRQAPGQGLEWMGWINPHSGETNYAQKFQGRVTMTRDTSISTAYMELSRLRSDDTAVYYCARTYYYDSSGYYHDAFDIWGQGTMVTVSSASTKGPSVFPLAPSSKSTSGGTAALGCLVKDYFPEPVTVSWNSGALTSGVHTFPAVLQSSGLYSLSSVVTVPSSSLGTQTYICNVNHKPSNTKVDKKVEPKSCGS

SEQ ID NO: 27884 - protein, 214 aa, Artificial Sequence; identical to SEQ ID NO: 26297
  Description of Artificial Sequence: Synthetic polypeptide
  XENP022057 [ICOS]_H0.7_L0_Fab_His Light Chain

SEQ ID NO: 27885 - protein, 230 aa, Artificial Sequence
  Description of Artificial Sequence: Synthetic polypeptide
  XENP022058 [ICOS]_H0.8_L0_Fab_His Heavy Chain
QVQLVQSGAEVKKPGASVKVSCKASGYTFTGYYMHWVRQAPGQGLEWMGWINPHSGGTSYAQKFQGRVTMTRDTSISTAYMELSRLRSDDTAVYYCARTYYYDSSGYYHDAFDIWGQGTMVTVSSASTKGPSVFPLAPSSKSTSGGTAALGCLVKDYFPEPVTVSWNSGALTSGVHTFPAVLQSSGLYSLSSVVTVPSSSLGTQTYICNVNHKPSNTKVDKKVEPKSCGS

SEQ ID NO: 27886 - protein, 214 aa, Artificial Sequence; identical to SEQ ID NO: 26297
  Description of Artificial Sequence: Synthetic polypeptide
  XENP022058 [ICOS]_H0.8_L0_Fab_His Light Chain

SEQ ID NO: 27887 - protein, 230 aa, Artificial Sequence
  Description of Artificial Sequence: Synthetic polypeptide
  XENP022059 [ICOS]_H0.9_L0_Fab_His Heavy Chain
QVQLVQSGAEVKKPGASVKVSCKASGYTFTGYYMHWVRQAPGQGLEWMGWINPHSGGTNYAEKFQGRVTMTRDTSISTAYMELSRLRSDDTAVYYCARTYYYDSSGYYHDAFDIWGQGTMVTVSSASTKGPSVFPLAPSSKSTSGGTAALGCLVKDYFPEPVTVSWNSGALTSGVHTFPAVLQSSGLYSLSSVVTVPSSSLGTQTYICNVNHKPSNTKVDKKVEPKSCGS

SEQ ID NO: 27888 - protein, 214 aa, Artificial Sequence; identical to SEQ ID NO: 26297
  Description of Artificial Sequence: Synthetic polypeptide
  XENP022059 [ICOS]_H0.9_L0_Fab_His Light Chain

SEQ ID NO: 27889 - protein, 230 aa, Artificial Sequence
  Description of Artificial Sequence: Synthetic polypeptide
  XENP022060 [ICOS]_H0.10_L0_Fab_His Heavy Chain
QVQLVQSGAEVKKPGASVKVSCKASGYTFTGYYMHWVRQAPGQGLEWMGWINPHSGGTNYAQKFQERVTMTRDTSISTAYMELSRLRSDDTAVYYCARTYYYDSSGYYHDAFDIWGQGTMVTVSSASTKGPSVFPLAPSSKSTSGGTAALGCLVKDYFPEPVTVSWNSGALTSGVHTFPAVLQSSGLYSLSSVVTVPSSSLGTQTYICNVNHKPSNTKVDKKVEPKSCGS

SEQ ID NO: 27890 - protein, 214 aa, Artificial Sequence; identical to SEQ ID NO: 26297
  Description of Artificial Sequence: Synthetic polypeptide
  XENP022060 [ICOS]_H0.10_L0_Fab_His Light Chain

SEQ ID NO: 27891 - protein, 230 aa, Artificial Sequence
  Description of Artificial Sequence: Synthetic polypeptide
  XENP022061 [ICOS]_H0.11_L0_Fab_His Heavy Chain
QVQLVQSGAEVKKPGASVKVSCKASGYTFTGYYMHWVRQAPGQGLEWMGWINPHSGGTNYAQKFQGRVTITRDTSISTAYMELSRLRSDDTAVYYCARTYYYDSSGYYHDAFDIWGQGTMVTVSSASTKGPSVFPLAPSSKSTSGGTAALGCLVKDYFPEPVTVSWNSGALTSGVHTFPAVLQSSGLYSLSSVVTVPSSSLGTQTYICNVNHKPSNTKVDKKVEPKSCGS

SEQ ID NO: 27892 - protein, 214 aa, Artificial Sequence; identical to SEQ ID NO: 26297
  Description of Artificial Sequence: Synthetic polypeptide
  XENP022061 [ICOS]_H0.11_L0_Fab_His Light Chain

SEQ ID NO: 27893 - protein, 230 aa, Artificial Sequence
  Description of Artificial Sequence: Synthetic polypeptide
  XENP022062 [ICOS]_H0.12_L0_Fab_His Heavy Chain
QVQLVQSGAEVKKPGASVKVSCKASGYTFTGYYMHWVRQAPGQGLEWMGWINPHSGGTNYAQKFQGRVTMTADTSISTAYMELSRLRSDDTAVYYCARTYYYDSSGYYHDAFDIWGQGTMVTVSSASTKGPSVFPLAPSSKSTSGGTAALGCLVKDYFPEPVTVSWNSGALTSGVHTFPAVLQSSGLYSLSSVVTVPSSSLGTQTYICNVNHKPSNTKVDKKVEPKSCGS

SEQ ID NO: 27894 - protein, 214 aa, Artificial Sequence; identical to SEQ ID NO: 26297
  Description of Artificial Sequence: Synthetic polypeptide
  XENP022062 [ICOS]_H0.12_L0_Fab_His Light Chain

SEQ ID NO: 27895 - protein, 230 aa, Artificial Sequence
  Description of Artificial Sequence: Synthetic polypeptide
  XENP022063 [ICOS]_H0.13_L0_Fab_His Heavy Chain
QVQLVQSGAEVKKPGASVKVSCKASGYTFTGYYMHWVRQAPGQGLEWMGWINPHSGGTNYAQKFQGRVTMTEDTSISTAYMELSRLRSDDTAVYYCARTYYYDSSGYYHDAFDIWGQGTMVTVSSASTKGPSVFPLAPSSKSTSGGTAALGCLVKDYFPEPVTVSWNSGALTSGVHTFPAVLQSSGLYSLSSVVTVPSSSLGTQTYICNVNHKPSNTKVDKKVEPKSCGS

SEQ ID NO: 27896 - protein, 214 aa, Artificial Sequence; identical to SEQ ID NO: 26297
  Description of Artificial Sequence: Synthetic polypeptide
  XENP022063 [ICOS]_H0.13_L0_Fab_His Light Chain

SEQ ID NO: 27897 - protein, 230 aa, Artificial Sequence
  Description of Artificial Sequence: Synthetic polypeptide
  XENP022064 [ICOS]_H0.14_L0_Fab_His Heavy Chain
QVQLVQSGAEVKKPGASVKVSCKASGYTFTGYYMHWVRQAPGQGLEWMGWINPHSGGTNYAQKFQGRVTMTTDTSISTAYMELSRLRSDDTAVYYCARTYYYDSSGYYHDAFDIWGQGTMVTVSSASTKGPSVFPLAPSSKSTSGGTAALGCLVKDYFPEPVTVSWNSGALTSGVHTFPAVLQSSGLYSLSSVVTVPSSSLGTQTYICNVNHKPSNTKVDKKVEPKSCGS

SEQ ID NO: 27898 - protein, 214 aa, Artificial Sequence; identical to SEQ ID NO: 26297
  Description of Artificial Sequence: Synthetic polypeptide
  XENP022064 [ICOS]_H0.14_L0_Fab_His Light Chain

SEQ ID NO: 27899 - protein, 230 aa, Artificial Sequence
  Description of Artificial Sequence: Synthetic polypeptide
  XENP022065 [ICOS]_H0.15_L0_Fab_His Heavy Chain
QVQLVQSGAEVKKPGASVKVSCKASGYTFTGYYMHWVRQAPGQGLEWMGWINPHSGGTNYAQKFQGRVTMTRDESISTAYMELSRLRSDDTAVYYCARTYYYDSSGYYHDAFDIWGQGTMVTVSSASTKGPSVFPLAPSSKSTSGGTAALGCLVKDYFPEPVTVSWNSGALTSGVHTFPAVLQSSGLYSLSSVVTVPSSSLGTQTYICNVNHKPSNTKVDKKVEPKSCGS

SEQ ID NO: 27900 - protein, 214 aa, Artificial Sequence; identical to SEQ ID NO: 26297
  Description of Artificial Sequence: Synthetic polypeptide
  XENP022065 [ICOS]_H0.15_L0_Fab_His Light Chain

SEQ ID NO: 27901 - protein, 230 aa, Artificial Sequence
  Description of Artificial Sequence: Synthetic polypeptide
  XENP022066 [ICOS]_H0.16_L0_Fab_His Heavy Chain
QVQLVQSGAEVKKPGASVKVSCKASGYTFTGYYMHWVRQAPGQGLEWMGWINPHSGGTNYAQKFQGRVTMTRDTSTSTAYMELSRLRSDDTAVYYCARTYYYDSSGYYHDAFDIWGQGTMVTVSSASTKGPSVFPLAPSSKSTSGGTAALGCLVKDYFPEPVTVSWNSGALTSGVHTFPAVLQSSGLYSLSSVVTVPSSSLGTQTYICNVNHKPSNTKVDKKVEPKSCGS

SEQ ID NO: 27902 - protein, 214 aa, Artificial Sequence; identical to SEQ ID NO: 26297
  Description of Artificial Sequence: Synthetic polypeptide
  XENP022066 [ICOS]_H0.16_L0_Fab_His Light Chain

SEQ ID NO: 27903 - protein, 230 aa, Artificial Sequence
  Description of Artificial Sequence: Synthetic polypeptide
  XENP022067 [ICOS]_H0.17_L0_Fab_His Heavy Chain
QVQLVQSGAEVKKPGASVKVSCKASGYTFTGYYMHWVRQAPGQGLEWMGWINPHSGGTNYAQKFQGRVTMTRDTSISTAYMELSSLRSDDTAVYYCARTYYYDSSGYYHDAFDIWGQGTMVTVSSASTKGPSVFPLAPSSKSTSGGTAALGCLVKDYFPEPVTVSWNSGALTSGVHTFPAVLQSSGLYSLSSVVTVPSSSLGTQTYICNVNHKPSNTKVDKKVEPKSCGS

SEQ ID NO: 27904 - protein, 214 aa, Artificial Sequence; identical to SEQ ID NO: 26297
  Description of Artificial Sequence: Synthetic polypeptide
  XENP022067 [ICOS]_H0.17_L0_Fab_His Light Chain

SEQ ID NO: 27905 - protein, 230 aa, Artificial Sequence
  Description of Artificial Sequence: Synthetic polypeptide
  XENP022068 [ICOS]_H0.18_L0_Fab_His Heavy Chain
QVQLVQSGAEVKKPGASVKVSCKASGYTFTGYYMHWVRQAPGQGLEWMGWINPHSGGTNYAQKFQGRVTMTRDTSISTAYMELSRLRSEDTAVYYCARTYYYDSSGYYHDAFDIWGQGTMVTVSSASTKGPSVFPLAPSSKSTSGGTAALGCLVKDYFPEPVTVSWNSGALTSGVHTFPAVLQSSGLYSLSSVVTVPSSSLGTQTYICNVNHKPSNTKVDKKVEPKSCGS

SEQ ID NO: 27906 - protein, 214 aa, Artificial Sequence; identical to SEQ ID NO: 26297
  Description of Artificial Sequence: Synthetic polypeptide
  XENP022068 [ICOS]_H0.18_L0_Fab_His Light Chain

SEQ ID NO: 27907 - protein, 230 aa, Artificial Sequence
  Description of Artificial Sequence: Synthetic polypeptide
  XENP022069 [ICOS]_H0.19_L0_Fab_His Heavy Chain
QVQLVQSGAEVKKPGASVKVSCKASGYTFTGYYMHWVRQAPGQGLEWMGWINPHSGGTNYAQKFQGRVTMTRDTSISTAYMELSRLRSDDTAVYYCARTYYYASSGYYHDAFDIWGQGTMVTVSSASTKGPSVFPLAPSSKSTSGGTAALGCLVKDYFPEPVTVSWNSGALTSGVHTFPAVLQSSGLYSLSSVVTVPSSSLGTQTYICNVNHKPSNTKVDKKVEPKSCGS

SEQ ID NO: 27908 - protein, 214 aa, Artificial Sequence; identical to SEQ ID NO: 26297
  Description of Artificial Sequence: Synthetic polypeptide
  XENP022069 [ICOS]_H0.19_L0_Fab_His Light Chain

SEQ ID NO: 27909 - protein, 230 aa, Artificial Sequence
  Description of Artificial Sequence: Synthetic polypeptide
  XENP022070 [ICOS]_H0.20_L0_Fab_His Heavy Chain
QVQLVQSGAEVKKPGASVKVSCKASGYTFTGYYMHWVRQAPGQGLEWMGWINPHSGGTNYAQKFQGRVTMTRDTSISTAYMELSRLRSDDTAVYYCARTYYYESSGYYHDAFDIWGQGTMVTVSSASTKGPSVFPLAPSSKSTSGGTAALGCLVKDYFPEPVTVSWNSGALTSGVHTFPAVLQSSGLYSLSSVVTVPSSSLGTQTYICNVNHKPSNTKVDKKVEPKSCGS

SEQ ID NO: 27910 - protein, 214 aa, Artificial Sequence; identical to SEQ ID NO: 26297
  Description of Artificial Sequence: Synthetic polypeptide
  XENP022070 [ICOS]_H0.20_L0_Fab_His Light Chain

SEQ ID NO: 27911 - protein, 230 aa, Artificial Sequence
  Description of Artificial Sequence: Synthetic polypeptide
  XENP022071 [ICOS]_H0.21_L0_Fab_His Heavy Chain
QVQLVQSGAEVKKPGASVKVSCKASGYTFTGYYMHWVRQAPGQGLEWMGWINPHSGGTNYAQKFQGRVTMTRDTSISTAYMELSRLRSDDTAVYYCARTYYYQSSGYYHDAFDIWGQGTMVTVSSASTKGPSVFPLAPSSKSTSGGTAALGCLVKDYFPEPVTVSWNSGALTSGVHTFPAVLQSSGLYSLSSVVTVPSSSLGTQTYICNVNHKPSNTKVDKKVEPKSCGS

SEQ ID NO: 27912 - protein, 214 aa, Artificial Sequence; identical to SEQ ID NO: 26297
  Description of Artificial Sequence: Synthetic polypeptide
  XENP022071 [ICOS]_H0.21_L0_Fab_His Light Chain

SEQ ID NO: 27913 - protein, 230 aa, Artificial Sequence
  Description of Artificial Sequence: Synthetic polypeptide
  XENP022072 [ICOS]_H0.22_L0_Fab_His Heavy Chain
QVQLVQSGAEVKKPGASVKVSCKASGYTFTGYYMHWVRQAPGQGLEWMGWINPHSGGTNYAQKFQGRVTMTRDTSISTAYMELSRLRSDDTAVYYCARTYYYSSSGYYHDAFDIWGQGTMVTVSSASTKGPSVFPLAPSSKSTSGGTAALGCLVKDYFPEPVTVSWNSGALTSGVHTFPAVLQSSGLYSLSSVVTVPSSSLGTQTYICNVNHKPSNTKVDKKVEPKSCGS

SEQ ID NO: 27914 - protein, 214 aa, Artificial Sequence; identical to SEQ ID NO: 26297
  Description of Artificial Sequence: Synthetic polypeptide
  XENP022072 [ICOS]_H0.22_L0_Fab_His Light Chain

SEQ ID NO: 27915 - protein, 230 aa, Artificial Sequence
  Description of Artificial Sequence: Synthetic polypeptide
  XENP022073 [ICOS]_H0.23_L0_Fab_His Heavy Chain
QVQLVQSGAEVKKPGASVKVSCKASGYTFTGYYMHWVRQAPGQGLEWMGWINPHSGGTNYAQKFQGRVTMTRDTSISTAYMELSRLRSDDTAVYYCARTYYYTSSGYYHDAFDIWGQGTMVTVSSASTKGPSVFPLAPSSKSTSGGTAALGCLVKDYFPEPVTVSWNSGALTSGVHTFPAVLQSSGLYSLSSVVTVPSSSLGTQTYICNVNHKPSNTKVDKKVEPKSCGS

SEQ ID NO: 27916 - protein, 214 aa, Artificial Sequence; identical to SEQ ID NO: 26297
  Description of Artificial Sequence: Synthetic polypeptide
  XENP022073 [ICOS]_H0.23_L0_Fab_His Light Chain

SEQ ID NO: 27917 - protein, 230 aa, Artificial Sequence
  Description of Artificial Sequence: Synthetic polypeptide
  XENP022074 [ICOS]_H0.24_L0_Fab_His Heavy Chain
QVQLVQSGAEVKKPGASVKVSCKASGYTFTGYYMHWVRQAPGQGLEWMGWINPHSGGTNYAQKFQGRVTMTRDTSISTAYMELSRLRSDDTAVYYCARTYYYDTSGYYHDAFDIWGQGTMVTVSSASTKGPSVFPLAPSSKSTSGGTAALGCLVKDYFPEPVTVSWNSGALTSGVHTFPAVLQSSGLYSLSSVVTVPSSSLGTQTYICNVNHKPSNTKVDKKVEPKSCGS

SEQ ID NO: 27918 - protein, 214 aa, Artificial Sequence; identical to SEQ ID NO: 26297
  Description of Artificial Sequence: Synthetic polypeptide
  XENP022074 [ICOS]_H0.24_L0_Fab_His Light Chain

SEQ ID NO: 27919 - protein, 230 aa, Artificial Sequence
  Description of Artificial Sequence: Synthetic polypeptide
  XENP022075 [ICOS]_H0.25_L0_Fab_His Heavy Chain
QVQLVQSGAEVKKPGASVKVSCKASGYTFTGYYMHWVRQAPGQGLEWMGWINPHSGGTNYAQKFQGRVTMTRDTSISTAYMELSRLRSDDTAVYYCARTYYYDSSGYYEDAFDIWGQGTMVTVSSASTKGPSVFPLAPSSKSTSGGTAALGCLVKDYFPEPVTVSWNSGALTSGVHTFPAVLQSSGLYSLSSVVTVPSSSLGTQTYICNVNHKPSNTKVDKKVEPKSCGS

SEQ ID NO: 27920 - protein, 214 aa, Artificial Sequence; identical to SEQ ID NO: 26297
  Description of Artificial Sequence: Synthetic polypeptide
  XENP022075 [ICOS]_H0.25_L0_Fab_His Light Chain

SEQ ID NO: 27921 - protein, 230 aa, Artificial Sequence
  Description of Artificial Sequence: Synthetic polypeptide
  XENP022076 [ICOS]_H0.26_L0_Fab_His Heavy Chain
QVQLVQSGAEVKKPGASVKVSCKASGYTFTGYYMHWVRQAPGQGLEWMGWINPHSGGTNYAQKFQGRVTMTRDTSISTAYMELSRLRSDDTAVYYCARTYYYDSSGYYQDAFDIWGQGTMVTVSSASTKGPSVFPLAPSSKSTSGGTAALGCLVKDYFPEPVTVSWNSGALTSGVHTFPAVLQSSGLYSLSSVVTVPSSSLGTQTYICNVNHKPSNTKVDKKVEPKSCGS

SEQ ID NO: 27922 - protein, 214 aa, Artificial Sequence; identical to SEQ ID NO: 26297
  Description of Artificial Sequence: Synthetic polypeptide
  XENP022076 [ICOS]_H0.26_L0_Fab_His Light Chain

SEQ ID NO: 27923 - protein, 230 aa, Artificial Sequence
  Description of Artificial Sequence: Synthetic polypeptide
  XENP022077 [ICOS]_H0.27_L0_Fab_His Heavy Chain
QVQLVQSGAEVKKPGASVKVSCKASGYTFTGYYMHWVRQAPGQGLEWMGWINPHSGGTNYAQKFQGRVTMTRDTSISTAYMELSRLRSDDTAVYYCARTYYYDSSGYYSDAFDIWGQGTMVTVSSASTKGPSVFPLAPSSKSTSGGTAALGCLVKDYFPEPVTVSWNSGALTSGVHTFPAVLQSSGLYSLSSVVTVPSSSLGTQTYICNVNHKPSNTKVDKKVEPKSCGS

SEQ ID NO: 27924 - protein, 214 aa, Artificial Sequence; identical to SEQ ID NO: 26297
  Description of Artificial Sequence: Synthetic polypeptide
  XENP022077 [ICOS]_H0.27_L0_Fab_His Light Chain

SEQ ID NO: 27925 - protein, 230 aa, Artificial Sequence
  Description of Artificial Sequence: Synthetic polypeptide
  XENP022078 [ICOS]_H0.28_L0_Fab_His Heavy Chain
QVQLVQSGAEVKKPGASVKVSCKASGYTFTGYYMHWVRQAPGQGLEWMGWINPHSGGTNYAQKFQGRVTMTRDTSISTAYMELSRLRSDDTAVYYCARTYYYDSSGYYYDAFDIWGQGTMVTVSSASTKGPSVFPLAPSSKSTSGGTAALGCLVKDYFPEPVTVSWNSGALTSGVHTFPAVLQSSGLYSLSSVVTVPSSSLGTQTYICNVNHKPSNTKVDKKVEPKSCGS

SEQ ID NO: 27926 - protein, 214 aa, Artificial Sequence; identical to SEQ ID NO: 26297
  Description of Artificial Sequence: Synthetic polypeptide
  XENP022078 [ICOS]_H0.28_L0_Fab_His Light Chain

SEQ ID NO: 27927 - protein, 230 aa, Artificial Sequence
  Description of Artificial Sequence: Synthetic polypeptide
  XENP022079 [ICOS]_H0.29_L0_Fab_His Heavy Chain
QVQLVQSGAEVKKPGASVKVSCKASGYTFTGYYMHWVRQAPGQGLEWMGWINPHSGGTNYAQKFQGRVTMTRDTSISTAYMELSRLRSDDTAVYYCARTYYYDSSGYYHAAFDIWGQGTMVTVSSASTKGPSVFPLAPSSKSTSGGTAALGCLVKDYFPEPVTVSWNSGALTSGVHTFPAVLQSSGLYSLSSVVTVPSSSLGTQTYICNVNHKPSNTKVDKKVEPKSCGS

SEQ ID NO: 27928 - protein, 214 aa, Artificial Sequence; identical to SEQ ID NO: 26297
  Description of Artificial Sequence: Synthetic polypeptide
  XENP022079 [ICOS]_H0.29_L0_Fab_His Light Chain

SEQ ID NO: 27929 - protein, 230 aa, Artificial Sequence
  Description of Artificial Sequence: Synthetic polypeptide
  XENP022080 [ICOS]_H0.30_L0_Fab_His Heavy Chain
QVQLVQSGAEVKKPGASVKVSCKASGYTFTGYYMHWVRQAPGQGLEWMGWINPHSGGTNYAQKFQGRVTMTRDTSISTAYMELSRLRSDDTAVYYCARTYYYDSSGYYHEAFDIWGQGTMVTVSSASTKGPSVFPLAPSSKSTSGGTAALGCLVKDYFPEPVTVSWNSGALTSGVHTFPAVLQSSGLYSLSSVVTVPSSSLGTQTYICNVNHKPSNTKVDKKVEPKSCGS

SEQ ID NO: 27930 - protein, 214 aa, Artificial Sequence; identical to SEQ ID NO: 26297
  Description of Artificial Sequence: Synthetic polypeptide
  XENP022080 [ICOS]_H0.30_L0_Fab_His Light Chain

SEQ ID NO: 27931 - protein, 230 aa, Artificial Sequence
  Description of Artificial Sequence: Synthetic polypeptide
  XENP022081 [ICOS]_H0.31_L0_Fab_His Heavy Chain
QVQLVQSGAEVKKPGASVKVSCKASGYTFTGYYMHWVRQAPGQGLEWMGWINPHSGGTNYAQKFQGRVTMTRDTSISTAYMELSRLRSDDTAVYYCARTYYYDSSGYYHQAFDIWGQGTMVTVSSASTKGPSVFPLAPSSKSTSGGTAALGCLVKDYFPEPVTVSWNSGALTSGVHTFPAVLQSSGLYSLSSVVTVPSSSLGTQTYICNVNHKPSNTKVDKKVEPKSCGS

SEQ ID NO: 27932 - protein, 214 aa, Artificial Sequence; identical to SEQ ID NO: 26297
  Description of Artificial Sequence: Synthetic polypeptide
  XENP022081 [ICOS]_H0.31_L0_Fab_His Light Chain

SEQ ID NO: 27933 - protein, 230 aa, Artificial Sequence
  Description of Artificial Sequence: Synthetic polypeptide
  XENP022082 [ICOS]_H0.32_L0_Fab_His Heavy Chain
QVQLVQSGAEVKKPGASVKVSCKASGYTFTGYYMHWVRQAPGQGLEWMGWINPHSGGTNYAQKFQGRVTMTRDTSISTAYMELSRLRSDDTAVYYCARTYYYDSSGYYHSAFDIWGQGTMVTVSSASTKGPSVFPLAPSSKSTSGGTAALGCLVKDYFPEPVTVSWNSGALTSGVHTFPAVLQSSGLYSLSSVVTVPSSSLGTQTYICNVNHKPSNTKVDKKVEPKSCGS

SEQ ID NO: 27934 - protein, 214 aa, Artificial Sequence; identical to SEQ ID NO: 26297
  Description of Artificial Sequence: Synthetic polypeptide
  XENP022082 [ICOS]_H0.32_L0_Fab_His Light Chain

SEQ ID NO: 27935 - protein, 230 aa, Artificial Sequence
  Description of Artificial Sequence: Synthetic polypeptide
  XENP022083 [ICOS]_H0.33_L0_Fab_His Heavy Chain
QVQLVQSGAEVKKPGASVKVSCKASGYTFTGYYMHWVRQAPGQGLEWMGWINPHSGGTNYAQKFQGRVTMTRDTSISTAYMELSRLRSDDTAVYYCARTYYYDSSGYYHTAFDIWGQGTMVTVSSASTKGPSVFPLAPSSKSTSGGTAALGCLVKDYFPEPVTVSWNSGALTSGVHTFPAVLQSSGLYSLSSVVTVPSSSLGTQTYICNVNHKPSNTKVDKKVEPKSCGS

SEQ ID NO: 27936 - protein, 214 aa, Artificial Sequence; identical to SEQ ID NO: 26297
  Description of Artificial Sequence: Synthetic polypeptide
  XENP022083 [ICOS]_H0.33_L0_Fab_His Light Chain

SEQ ID NO: 27937 - protein, 230 aa, Artificial Sequence
  Description of Artificial Sequence: Synthetic polypeptide
  XENP022084 [ICOS]_H0.34_L0_Fab_His Heavy Chain
QVQLVQSGAEVKKPGASVKVSCKASGYTFTGYYMHWVRQAPGQGLEWMGWINPHSGGTNYAQKFQGRVTMTRDTSISTAYMELSRLRSDDTAVYYCARTYYYDSSGYYHDAFDVWGQGTMVTVSSASTKGPSVFPLAPSSKSTSGGTAALGCLVKDYFPEPVTVSWNSGALTSGVHTFPAVLQSSGLYSLSSVVTVPSSSLGTQTYICNVNHKPSNTKVDKKVEPKSCGS

SEQ ID NO: 27938 - protein, 214 aa, Artificial Sequence; identical to SEQ ID NO: 26297
  Description of Artificial Sequence: Synthetic polypeptide
  XENP022084 [ICOS]_H0.34_L0_Fab_His Light Chain

SEQ ID NO: 27939 - protein, 230 aa, Artificial Sequence; identical to SEQ ID NO: 27869
  Description of Artificial Sequence: Synthetic polypeptide
  XENP022085 [ICOS]_H0_L0.1_Fab_His Heavy Chain

SEQ ID NO: 27940 - protein, 214 aa, Artificial Sequence
  Description of Artificial Sequence: Synthetic polypeptide
  XENP022085 [ICOS]_H0_L0.1_Fab_His Light Chain
DIQMTQSPSSLSASVGDRVTITCRASQGISRLLAWYQQKPGKAPKLLIYVASSLQSGVPSRFSGSGSGTDFTLTISSLQPEDFATYYCQQANSFPWTFGQGTKVEIKRTVAAPSVFIFPPSDEQLKSGTASVVCLLNNFYPREAKVQWKVDNALQSGNSQESVTEQDSKDSTYSLSSTLTLSKADYEKHKVYACEVTHQGLSSPVTKSFNRGEC

SEQ ID NO: 27941 - protein, 230 aa, Artificial Sequence; identical to SEQ ID NO: 27869
  Description of Artificial Sequence: Synthetic polypeptide
  XENP022086 [ICOS]_H0_L0.2_Fab_His Heavy Chain

SEQ ID NO: 27942 - protein, 214 aa, Artificial Sequence
  Description of Artificial Sequence: Synthetic polypeptide
  XENP022086 [ICOS]_H0_L0.2_Fab_His Light Chain
DIQMTQSPSSVSASVGDRVTITCQASQGISRLLAWYQQKPGKAPKLLIYVASSLQSGVPSRFSGSGSGTDFTLTISSLQPEDFATYYCQQANSFPWTFGQGTKVEIKRTVAAPSVFIFPPSDEQLKSGTASVVCLLNNFYPREAKVQWKVDNALQSGNSQESVTEQDSKDSTYSLSSTLTLSKADYEKHKVYACEVTHQGLSSPVTKSFNRGEC

SEQ ID NO: 27943 - protein, 230 aa, Artificial Sequence; identical to SEQ ID NO: 27869
  Description of Artificial Sequence: Synthetic polypeptide
  XENP022087 [ICOS]_H0_L0.3_Fab_His Heavy Chain

SEQ ID NO: 27944 - protein, 214 aa, Artificial Sequence
  Description of Artificial Sequence: Synthetic polypeptide
  XENP022087 [ICOS]_H0_L0.3_Fab_His Light Chain
DIQMTQSPSSVSASVGDRVTITCRASQDISRLLAWYQQKPGKAPKLLIYVASSLQSGVPSRFSGSGSGTDFTLTISSLQPEDFATYYCQQANSFPWTFGQGTKVEIKRTVAAPSVFIFPPSDEQLKSGTASVVCLLNNFYPREAKVQWKVDNALQSGNSQESVTEQDSKDSTYSLSSTLTLSKADYEKHKVYACEVTHQGLSSPVTKSFNRGEC

SEQ ID NO: 27945 - protein, 230 aa, Artificial Sequence; identical to SEQ ID NO: 27869
  Description of Artificial Sequence: Synthetic polypeptide
  XENP022088 [ICOS]_H0_L0.4_Fab_His Heavy Chain

SEQ ID NO: 27946 - protein, 214 aa, Artificial Sequence
  Description of Artificial Sequence: Synthetic polypeptide
  XENP022088 [ICOS]_H0_L0.4_Fab_His Light Chain
DIQMTQSPSSVSASVGDRVTITCRASQSISRLLAWYQQKPGKAPKLLIYVASSLQSGVPSRFSGSGSGTDFTLTISSLQPEDFATYYCQQANSFPWTFGQGTKVEIKRTVAAPSVFIFPPSDEQLKSGTASVVCLLNNFYPREAKVQWKVDNALQSGNSQESVTEQDSKDSTYSLSSTLTLSKADYEKHKVYACEVTHQGLSSPVTKSFNRGEC

SEQ ID NO: 27947 - protein, 230 aa, Artificial Sequence; identical to SEQ ID NO: 27869
  Description of Artificial Sequence: Synthetic polypeptide
  XENP022089 [ICOS]_H0_L0.5_Fab_His Heavy Chain

SEQ ID NO: 27948 - protein, 214 aa, Artificial Sequence; identical to SEQ ID NO: 27243
  Description of Artificial Sequence: Synthetic polypeptide
  XENP022089 [ICOS]_H0_L0.5_Fab_His Light Chain

SEQ ID NO: 27949 - protein, 230 aa, Artificial Sequence; identical to SEQ ID NO: 27869
  Description of Artificial Sequence: Synthetic polypeptide
  XENP022090 [ICOS]_H0_L0.6_Fab_His Heavy Chain

SEQ ID NO: 27950 - protein, 214 aa, Artificial Sequence
  Description of Artificial Sequence: Synthetic polypeptide
  XENP022090 [ICOS]_H0_L0.6_Fab_His Light Chain
DIQMTQSPSSVSASVGDRVTITCRASQGISSWLAWYQQKPGKAPKLLIYVASSLQSGVPSRFSGSGSGTDFTLTISSLQPEDFATYYCQQANSFPWTFGQGTKVEIKRTVAAPSVFIFPPSDEQLKSGTASVVCLLNNFYPREAKVQWKVDNALQSGNSQESVTEQDSKDSTYSLSSTLTLSKADYEKHKVYACEVTHQGLSSPVTKSFNRGEC

SEQ ID NO: 27951 - protein, 230 aa, Artificial Sequence; identical to SEQ ID NO: 27869
  Description of Artificial Sequence: Synthetic polypeptide
  XENP022091 [ICOS]_H0_L0.7_Fab_His Heavy Chain

SEQ ID NO: 27952 - protein, 214 aa, Artificial Sequence; identical to SEQ ID NO: 26477
  Description of Artificial Sequence: Synthetic polypeptide
  XENP022091 [ICOS]_H0_L0.7_Fab_His Light Chain

SEQ ID NO: 27953 - protein, 230 aa, Artificial Sequence; identical to SEQ ID NO: 27869
  Description of Artificial Sequence: Synthetic polypeptide
  XENP022092 [ICOS]_H0_L0.8_Fab_His Heavy Chain

SEQ ID NO: 27954 - protein, 214 aa, Artificial Sequence
  Description of Artificial Sequence: Synthetic polypeptide
  XENP022092 [ICOS]_H0_L0.8_Fab_His Light Chain
DIQMTQSPSSVSASVGDRVTITCRASQGISRWLAWYQQKPGKAPKLLIYVASSLQSGVPSRFSGSGSGTDFTLTISSLQPEDFATYYCQQANSFPWTFGQGTKVEIKRTVAAPSVFIFPPSDEQLKSGTASVVCLLNNFYPREAKVQWKVDNALQSGNSQESVTEQDSKDSTYSLSSTLTLSKADYEKHKVYACEVTHQGLSSPVTKSFNRGEC

SEQ ID NO: 27955 - protein, 230 aa, Artificial Sequence; identical to SEQ ID NO: 27869
  Description of Artificial Sequence: Synthetic polypeptide
  XENP022093 [ICOS]_H0_L0.9_Fab_His Heavy Chain

SEQ ID NO: 27956 - protein, 214 aa, Artificial Sequence; identical to SEQ ID NO: 27265
  Description of Artificial Sequence: Synthetic polypeptide
  XENP022093 [ICOS]_H0_L0.9_Fab_His Light Chain

SEQ ID NO: 27957 - protein, 230 aa, Artificial Sequence; identical to SEQ ID NO: 27869
  Description of Artificial Sequence: Synthetic polypeptide
  XENP022094 [ICOS]_H0_L0.10_Fab_His Heavy Chain

SEQ ID NO: 27958 - protein, 214 aa, Artificial Sequence; identical to SEQ ID NO: 27276
  Description of Artificial Sequence: Synthetic polypeptide
  XENP022094 [ICOS]_H0_L0.10_Fab_His Light Chain

SEQ ID NO: 27959 - protein, 230 aa, Artificial Sequence; identical to SEQ ID NO: 27869
  Description of Artificial Sequence: Synthetic polypeptide
  XENP022095 [ICOS]_H0_L0.11_Fab_His Heavy Chain

SEQ ID NO: 27960 - protein, 214 aa, Artificial Sequence
  Description of Artificial Sequence: Synthetic polypeptide
  XENP022095 [ICOS]_H0_L0.11_Fab_His Light Chain
DIQMTQSPSSVSASVGDRVTITCRASQGISRLLAWYQQKPGKAPKLLIYSASSLQSGVPSRFSGSGSGTDFTLTISSLQPEDFATYYCQQANSFPWTFGQGTKVEIKRTVAAPSVFIFPPSDEQLKSGTASVVCLLNNFYPREAKVQWKVDNALQSGNSQESVTEQDSKDSTYSLSSTLTLSKADYEKHKVYACEVTHQGLSSPVTKSFNRGEC

SEQ ID NO: 27961 - protein, 230 aa, Artificial Sequence; identical to SEQ ID NO: 27869
  Description of Artificial Sequence: Synthetic polypeptide
  XENP022096 [ICOS]_H0_L0.12_Fab_His Heavy Chain

SEQ ID NO: 27962 - protein, 214 aa, Artificial Sequence
  Description of Artificial Sequence: Synthetic polypeptide
  XENP022096 [ICOS]_H0_L0.12_Fab_His Light Chain
DIQMTQSPSSVSASVGDRVTITCRASQGISRLLAWYQQKPGKAPKLLIYVASTLQSGVPSRFSGSGSGTDFTLTISSLQPEDFATYYCQQANSFPWTFGQGTKVEIKRTVAAPSVFIFPPSDEQLKSGTASVVCLLNNFYPREAKVQWKVDNALQSGNSQESVTEQDSKDSTYSLSSTLTLSKADYEKHKVYACEVTHQGLSSPVTKSFNRGEC

SEQ ID NO: 27963 - protein, 230 aa, Artificial Sequence; identical to SEQ ID NO: 27869
  Description of Artificial Sequence: Synthetic polypeptide
  XENP022101 [ICOS]_H0_L0.13_Fab_His Heavy Chain

SEQ ID NO: 27964 - protein, 214 aa, Artificial Sequence
  Description of Artificial Sequence: Synthetic polypeptide
  XENP022101 [ICOS]_H0_L0.13_Fab_His Light Chain
DIQMTQSPSSVSASVGDRVTITCRASQGISRLLAWYQQKPGKAPKLLIYVASSLESGVPSRFSGSGSGTDFTLTISSLQPEDFATYYCQQANSFPWTFGQGTKVEIKRTVAAPSVFIFPPSDEQLKSGTASVVCLLNNFYPREAKVQWKVDNALQSGNSQESVTEQDSKDSTYSLSSTLTLSKADYEKHKVYACEVTHQGLSSPVTKSFNRGEC

SEQ ID NO: 27965 - protein, 230 aa, Artificial Sequence; identical to SEQ ID NO: 27869
  Description of Artificial Sequence: Synthetic polypeptide
  XENP022102 [ICOS]_H0_L0.14_Fab_His Heavy Chain

SEQ ID NO: 27966 - protein, 214 aa, Artificial Sequence; identical to SEQ ID NO: 27287
  Description of Artificial Sequence: Synthetic polypeptide
  XENP022102 [ICOS]_H0_L0.14_Fab_His Light Chain

SEQ ID NO: 27967 - protein, 230 aa, Artificial Sequence; identical to SEQ ID NO: 27869
  Description of Artificial Sequence: Synthetic polypeptide
  XENP022103 [ICOS]_H0_L0.15_Fab_His Heavy Chain

SEQ ID NO: 27968 - protein, 214 aa, Artificial Sequence; identical to SEQ ID NO: 27298
  Description of Artificial Sequence: Synthetic polypeptide
  XENP022103 [ICOS]_H0_L0.15_Fab_His Light Chain

SEQ ID NO: 27969 - protein, 230 aa, Artificial Sequence; identical to SEQ ID NO: 27869
  Description of Artificial Sequence: Synthetic polypeptide
  XENP022104 [ICOS]_H0_L0.16_Fab_His Heavy Chain

SEQ ID NO: 27970 - protein, 214 aa, Artificial Sequence
  Description of Artificial Sequence: Synthetic polypeptide
  XENP022104 [ICOS]_H0_L0.16_Fab_His Light Chain
DIQMTQSPSSVSASVGDRVTITCRASQGISRLLAWYQQKPGKAPKLLIYVASSLQSGVPSRFSGSGSGTDFTLTISSLQPEDFATYYCQQAQSFPWTFGQGTKVEIKRTVAAPSVFIFPPSDEQLKSGTASVVCLLNNFYPREAKVQWKVDNALQSGNSQESVTEQDSKDSTYSLSSTLTLSKADYEKHKVYACEVTHQGLSSPVTKSFNRGEC

SEQ ID NO: 27971 - protein, 230 aa, Artificial Sequence; identical to SEQ ID NO: 27869
  Description of Artificial Sequence: Synthetic polypeptide
  XENP022105 [ICOS]_H0_L0.17_Fab_His Heavy Chain

SEQ ID NO: 27972 - protein, 214 aa, Artificial Sequence
  Description of Artificial Sequence: Synthetic polypeptide
  XENP022105 [ICOS]_H0_L0.17_Fab_His Light Chain
DIQMTQSPSSVSASVGDRVTITCRASQGISRLLAWYQQKPGKAPKLLIYVASSLQSGVPSRFSGSGSGTDFTLTISSLQPEDFATYYCQQAYSFPWTFGQGTKVEIKRTVAAPSVFIFPPSDEQLKSGTASVVCLLNNFYPREAKVQWKVDNALQSGNSQESVTEQDSKDSTYSLSSTLTLSKADYEKHKVYACEVTHQGLSSPVTKSFNRGEC

SEQ ID NO: 27973 - protein, 230 aa, Artificial Sequence; identical to SEQ ID NO: 27869
  Description of Artificial Sequence: Synthetic polypeptide
  XENP022106 [ICOS]_H0_L0.18_Fab_His Heavy Chain

SEQ ID NO: 27974 - protein, 214 aa, Artificial Sequence
  Description of Artificial Sequence: Synthetic polypeptide
  XENP022106 [ICOS]_H0_L0.18_Fab_His Light Chain
DIQMTQSPSSVSASVGDRVTITCRASQGISRLLAWYQQKPGKAPKLLIYVASSLQSGVPSRFSGSGSGTDFTLTISSLQPEDFATYYCQQANTFPWTFGQGTKVEIKRTVAAPSVFIFPPSDEQLKSGTASVVCLLNNFYPREAKVQWKVDNALQSGNSQESVTEQDSKDSTYSLSSTLTLSKADYEKHKVYACEVTHQGLSSPVTKSFNRGEC

SEQ ID NO: 27975 - protein, 230 aa, Artificial Sequence; identical to SEQ ID NO: 27869
  Description of Artificial Sequence: Synthetic polypeptide
  XENP022107 [ICOS]_H0_L0.19_Fab_His Heavy Chain

SEQ ID NO: 27976 - protein, 214 aa, Artificial Sequence
  Description of Artificial Sequence: Synthetic polypeptide
  XENP022107 [ICOS]_H0_L0.19_Fab_His Light Chain
DIQMTQSPSSVSASVGDRVTITCRASQGISRLLAWYQQKPGKAPKLLIYVASSLQSGVPSRFSGSGSGTDFTLTISSLQPEDFATYYCQQANSTPWTFGQGTKVEIKRTVAAPSVFIFPPSDEQLKSGTASVVCLLNNFYPREAKVQWKVDNALQSGNSQESVTEQDSKDSTYSLSSTLTLSKADYEKHKVYACEVTHQGLSSPVTKSFNRGEC

SEQ ID NO: 27977 - protein, 230 aa, Artificial Sequence; identical to SEQ ID NO: 27869
  Description of Artificial Sequence: Synthetic polypeptide
  XENP022108 [ICOS]_H0_L0.20_Fab_His Heavy Chain

SEQ ID NO: 27978 - protein, 214 aa, Artificial Sequence; identical to SEQ ID NO: 27309
  Description of Artificial Sequence: Synthetic polypeptide
  XENP022108 [ICOS]_H0_L0.20_Fab_His Light Chain

SEQ ID NO: 27979 - protein, 230 aa, Artificial Sequence; identical to SEQ ID NO: 27869
  Description of Artificial Sequence: Synthetic polypeptide
  XENP022767 [ICOS]_H0_L0.21_Fab_His Heavy Chain

SEQ ID NO: 27980 - protein, 214 aa, Artificial Sequence
  Description of Artificial Sequence: Synthetic polypeptide
  XENP022767 [ICOS]_H0_L0.21_Fab_His Light Chain
DIQMTQSPSSVSASVGDRVTITCRASQDISSLLAWYQQKPGKAPKLLIYVASSLQSGVPSRFSGSGSGTDFTLTISSLQPEDFATYYCQQANSFPWTFGQGTKVEIKRTVAAPSVFIFPPSDEQLKSGTASVVCLLNNFYPREAKVQWKVDNALQSGNSQESVTEQDSKDSTYSLSSTLTLSKADYEKHKVYACEVTHQGLSSPVTKSFNRGEC

SEQ ID NO: 27981 - protein, 230 aa, Artificial Sequence; identical to SEQ ID NO: 27869
  Description of Artificial Sequence: Synthetic polypeptide
  XENP022768 [ICOS]_H0_L0.22_Fab_His Heavy Chain

SEQ ID NO: 27982 - protein, 214 aa, Artificial Sequence
  Description of Artificial Sequence: Synthetic polypeptide
  XENP022768 [ICOS]_H0_L0.22_Fab_His Light Chain
DIQMTQSPSSVSASVGDRVTITCRASQDISRLLAWYQQKPGKAPKLLIYAASSLQSGVPSRFSGSGSGTDFTLTISSLQPEDFATYYCQQANSFPWTFGQGTKVEIKRTVAAPSVFIFPPSDEQLKSGTASVVCLLNNFYPREAKVQWKVDNALQSGNSQESVTEQDSKDSTYSLSSTLTLSKADYEKHKVYACEVTHQGLSSPVTKSFNRGEC

SEQ ID NO: 27983 - protein, 230 aa, Artificial Sequence; identical to SEQ ID NO: 27869
  Description of Artificial Sequence: Synthetic polypeptide
  XENP022769 [ICOS]_H0_L0.23_Fab_His Heavy Chain

SEQ ID NO: 27984 - protein, 214 aa, Artificial Sequence
  Description of Artificial Sequence: Synthetic polypeptide
  XENP022769 [ICOS]_H0_L0.23_Fab_His Light Chain
DIQMTQSPSSVSASVGDRVTITCRASQDISRLLAWYQQKPGKAPKLLIYVASSLQSGVPSRFSGSGSGTDFTLTISSLQPEDFATYYCQQAESFPWTFGQGTKVEIKRTVAAPSVFIFPPSDEQLKSGTASVVCLLNNFYPREAKVQWKVDNALQSGNSQESVTEQDSKDSTYSLSSTLTLSKADYEKHKVYACEVTHQGLSSPVTKSFNRGEC

SEQ ID NO: 27985 - protein, 230 aa, Artificial Sequence; identical to SEQ ID NO: 27869
  Description of Artificial Sequence: Synthetic polypeptide
  XENP022770 [ICOS]_H0_L0.24_Fab_His Heavy Chain

SEQ ID NO: 27986 - protein, 214 aa, Artificial Sequence
  Description of Artificial Sequence: Synthetic polypeptide
  XENP022770 [ICOS]_H0_L0.24_Fab_His Light Chain
DIQMTQSPSSVSASVGDRVTITCRASQGISSLLAWYQQKPGKAPKLLIYAASSLQSGVPSRFSGSGSGTDFTLTISSLQPEDFATYYCQQANSFPWTFGQGTKVEIKRTVAAPSVFIFPPSDEQLKSGTASVVCLLNNFYPREAKVQWKVDNALQSGNSQESVTEQDSKDSTYSLSSTLTLSKADYEKHKVYACEVTHQGLSSPVTKSFNRGEC

SEQ ID NO: 27987 - protein, 230 aa, Artificial Sequence; identical to SEQ ID NO: 27869
  Description of Artificial Sequence: Synthetic polypeptide
  XENP022771 [ICOS]_H0_L0.25_Fab_His Heavy Chain

SEQ ID NO: 27988 - protein, 214 aa, Artificial Sequence
  Description of Artificial Sequence: Synthetic polypeptide
  XENP022771 [ICOS]_H0_L0.25_Fab_His Light Chain
DIQMTQSPSSVSASVGDRVTITCRASQGISSLLAWYQQKPGKAPKLLIYVASSLQSGVPSRFSGSGSGTDFTLTISSLQPEDFATYYCQQAESFPWTFGQGTKVEIKRTVAAPSVFIFPPSDEQLKSGTASVVCLLNNFYPREAKVQWKVDNALQSGNSQESVTEQDSKDSTYSLSSTLTLSKADYEKHKVYACEVTHQGLSSPVTKSFNRGEC

SEQ ID NO: 27989 - protein, 230 aa, Artificial Sequence; identical to SEQ ID NO: 27869
  Description of Artificial Sequence: Synthetic polypeptide
  XENP022772 [ICOS]_H0_L0.26_Fab_His Heavy Chain

SEQ ID NO: 27990 - protein, 214 aa, Artificial Sequence
  Description of Artificial Sequence: Synthetic polypeptide
  XENP022772 [ICOS]_H0_L0.26_Fab_His Light Chain
DIQMTQSPSSVSASVGDRVTITCRASQGISRLLAWYQQKPGKAPKLLIYAASSLQSGVPSRFSGSGSGTDFTLTISSLQPEDFATYYCQQAESFPWTFGQGTKVEIKRTVAAPSVFIFPPSDEQLKSGTASVVCLLNNFYPREAKVQWKVDNALQSGNSQESVTEQDSKDSTYSLSSTLTLSKADYEKHKVYACEVTHQGLSSPVTKSFNRGEC

SEQ ID NO: 27991 - protein, 230 aa, Artificial Sequence; identical to SEQ ID NO: 27869
  Description of Artificial Sequence: Synthetic polypeptide
  XENP022773 [ICOS]_H0_L0.27_Fab_His Heavy Chain

SEQ ID NO: 27992 - protein, 214 aa, Artificial Sequence
  Description of Artificial Sequence: Synthetic polypeptide
  XENP022773 [ICOS]_H0_L0.27_Fab_His Light Chain
DIQMTQSPSSVSASVGDRVTITCRASQDISSLLAWYQQKPGKAPKLLIYAASSLQSGVPSRFSGSGSGTDFTLTISSLQPEDFATYYCQQANSFPWTFGQGTKVEIKRTVAAPSVFIFPPSDEQLKSGTASVVCLLNNFYPREAKVQWKVDNALQSGNSQESVTEQDSKDSTYSLSSTLTLSKADYEKHKVYACEVTHQGLSSPVTKSFNRGEC

SEQ ID NO: 27993 - protein, 230 aa, Artificial Sequence; identical to SEQ ID NO: 27869
  Description of Artificial Sequence: Synthetic polypeptide
  XENP022774 [ICOS]_H0_L0.28_Fab_His Heavy Chain

SEQ ID NO: 27994 - protein, 214 aa, Artificial Sequence
  Description of Artificial Sequence: Synthetic polypeptide
  XENP022774 [ICOS]_H0_L0.28_Fab_His Light Chain
DIQMTQSPSSVSASVGDRVTITCRASQDISSLLAWYQQKPGKAPKLLIYVASSLQSGVPSRFSGSGSGTDFTLTISSLQPEDFATYYCQQAESFPWTFGQGTKVEIKRTVAAPSVFIFPPSDEQLKSGTASVVCLLNNFYPREAKVQWKVDNALQSGNSQESVTEQDSKDSTYSLSSTLTLSKADYEKHKVYACEVTHQGLSSPVTKSFNRGEC

SEQ ID NO: 27995 - protein, 230 aa, Artificial Sequence; identical to SEQ ID NO: 27869
  Description of Artificial Sequence: Synthetic polypeptide
  XENP022775 [ICOS]_H0_L0.29_Fab_His Heavy Chain

SEQ ID NO: 27996 - protein, 214 aa, Artificial Sequence
  Description of Artificial Sequence: Synthetic polypeptide
  XENP022775 [ICOS]_H0_L0.29_Fab_His Light Chain
DIQMTQSPSSVSASVGDRVTITCRASQDISRLLAWYQQKPGKAPKLLIYAASSLQSGVPSRFSGSGSGTDFTLTISSLQPEDFATYYCQQAESFPWTFGQGTKVEIKRTVAAPSVFIFPPSDEQLKSGTASVVCLLNNFYPREAKVQWKVDNALQSGNSQESVTEQDSKDSTYSLSSTLTLSKADYEKHKVYACEVTHQGLSSPVTKSFNRGEC

SEQ ID NO: 27997 - protein, 230 aa, Artificial Sequence; identical to SEQ ID NO: 27869
  Description of Artificial Sequence: Synthetic polypeptide
  XENP022776 [ICOS]_H0_L0.30_Fab_His Heavy Chain

SEQ ID NO: 27998 - protein, 214 aa, Artificial Sequence
  Description of Artificial Sequence: Synthetic polypeptide
  XENP022776 [ICOS]_H0_L0.30_Fab_His Light Chain
DIQMTQSPSSVSASVGDRVTITCRASQGISSLLAWYQQKPGKAPKLLIYAASSLQSGVPSRFSGSGSGTDFTLTISSLQPEDFATYYCQQAESFPWTFGQGTKVEIKRTVAAPSVFIFPPSDEQLKSGTASVVCLLNNFYPREAKVQWKVDNALQSGNSQESVTEQDSKDSTYSLSSTLTLSKADYEKHKVYACEVTHQGLSSPVTKSFNRGEC

SEQ ID NO: 27999 - protein, 230 aa, Artificial Sequence; identical to SEQ ID NO: 27869
  Description of Artificial Sequence: Synthetic polypeptide
  XENP022777 [ICOS]_H0_L0.31_Fab_His Heavy Chain

SEQ ID NO: 28000 - protein, 214 aa, Artificial Sequence
  Description of Artificial Sequence: Synthetic polypeptide
  XENP022777 [ICOS]_H0_L0.31_Fab_His Light Chain
DIQMTQSPSSVSASVGDRVTITCRASQDISSLLAWYQQKPGKAPKLLIYAASSLQSGVPSRFSGSGSGTDFTLTISSLQPEDFATYYCQQAESFPWTFGQGTKVEIKRTVAAPSVFIFPPSDEQLKSGTASVVCLLNNFYPREAKVQWKVDNALQSGNSQESVTEQDSKDSTYSLSSTLTLSKADYEKHKVYACEVTHQGLSSPVTKSFNRGEC

SEQ ID NO: 28001 - protein, 230 aa, Artificial Sequence; identical to SEQ ID NO: 27869
  Description of Artificial Sequence: Synthetic polypeptide
  XENP022778 [ICOS]_H0_L0.32_Fab_His Heavy Chain

SEQ ID NO: 28002 - protein, 214 aa, Artificial Sequence
  Description of Artificial Sequence: Synthetic polypeptide
  XENP022778 [ICOS]_H0_L0.32_Fab_His Light Chain
DIQMTQSPSSVSASVGDRVTITCQASQDISSLLAWYQQKPGKAPKLLIYVASSLQSGVPSRFSGSGSGTDFTLTISSLQPEDFATYYCQQANSFPWTFGQGTKVEIKRTVAAPSVFIFPPSDEQLKSGTASVVCLLNNFYPREAKVQWKVDNALQSGNSQESVTEQDSKDSTYSLSSTLTLSKADYEKHKVYACEVTHQGLSSPVTKSFNRGEC

SEQ ID NO: 28003 - protein, 230 aa, Artificial Sequence; identical to SEQ ID NO: 27869
  Description of Artificial Sequence: Synthetic polypeptide
  XENP022779 [ICOS]_H0_L0.33_Fab_His Heavy Chain

SEQ ID NO: 28004 - protein, 214 aa, Artificial Sequence
  Description of Artificial Sequence: Synthetic polypeptide
  XENP022779 [ICOS]_H0_L0.33_Fab_His Light Chain
DIQMTQSPSSVSASVGDRVTITCQASQDISRLLAWYQQKPGKAPKLLIYAASSLQSGVPSRFSGSGSGTDFTLTISSLQPEDFATYYCQQANSFPWTFGQGTKVEIKRTVAAPSVFIFPPSDEQLKSGTASVVCLLNNFYPREAKVQWKVDNALQSGNSQESVTEQDSKDSTYSLSSTLTLSKADYEKHKVYACEVTHQGLSSPVTKSFNRGEC

SEQ ID NO: 28005 - protein, 230 aa, Artificial Sequence; identical to SEQ ID NO: 27869
  Description of Artificial Sequence: Synthetic polypeptide
  XENP022780 [ICOS]_H0_L0.34_Fab_His Heavy Chain

SEQ ID NO: 28006 - protein, 214 aa, Artificial Sequence; identical to SEQ ID NO: 26497
  Description of Artificial Sequence: Synthetic polypeptide
  XENP022780 [ICOS]_H0_L0.34_Fab_His Light Chain

SEQ ID NO: 28007 - protein, 230 aa, Artificial Sequence; identical to SEQ ID NO: 27869
  Description of Artificial Sequence: Synthetic polypeptide
  XENP022781 [ICOS]_H0_L0.35_Fab_His Heavy Chain

SEQ ID NO: 28008 - protein, 214 aa, Artificial Sequence
  Description of Artificial Sequence: Synthetic polypeptide
  XENP022781 [ICOS]_H0_L0.35_Fab_His Light Chain
DIQMTQSPSSVSASVGDRVTITCQASQDISSLLAWYQQKPGKAPKLLIYAASSLQSGVPSRFSGSGSGTDFTLTISSLQPEDFATYYCQQANSFPWTFGQGTKVEIKRTVAAPSVFIFPPSDEQLKSGTASVVCLLNNFYPREAKVQWKVDNALQSGNSQESVTEQDSKDSTYSLSSTLTLSKADYEKHKVYACEVTHQGLSSPVTKSFNRGEC

SEQ ID NO: 28009 - protein, 230 aa, Artificial Sequence; identical to SEQ ID NO: 27869
  Description of Artificial Sequence: Synthetic polypeptide
  XENP022782 [ICOS]_H0_L0.36_Fab_His Heavy Chain

SEQ ID NO: 28010 - protein, 214 aa, Artificial Sequence; identical to SEQ ID NO: 26517
  Description of Artificial Sequence: Synthetic polypeptide
  XENP022782 [ICOS]_H0_L0.36_Fab_His Light Chain

SEQ ID NO: 28011 - protein, 230 aa, Artificial Sequence; identical to SEQ ID NO: 27869
  Description of Artificial Sequence: Synthetic polypeptide
  XENP022783 [ICOS]_H0_L0.37_Fab_His Heavy Chain

SEQ ID NO: 28012 - protein, 214 aa, Artificial Sequence; identical to SEQ ID NO: 26537
  Description of Artificial Sequence: Synthetic polypeptide
  XENP022783 [ICOS]_H0_L0.37_Fab_His Light Chain

SEQ ID NO: 28013 - protein, 230 aa, Artificial Sequence; identical to SEQ ID NO: 27869
  Description of Artificial Sequence: Synthetic polypeptide
  XENP022784 [ICOS]_H0_L0.38_Fab_His Heavy Chain

SEQ ID NO: 28014 - protein, 214 aa, Artificial Sequence; identical to SEQ ID NO: 26557
  Description of Artificial Sequence: Synthetic polypeptide
  XENP022784 [ICOS]_H0_L0.38_Fab_His Light Chain

SEQ ID NO: 28015 - protein, 230 aa, Artificial Sequence; identical to SEQ ID NO: 27869
  Description of Artificial Sequence: Synthetic polypeptide
  XENP022860 [ICOS]_H0_L0.42_Fab_His Heavy Chain

SEQ ID NO: 28016 - protein, 214 aa, Artificial Sequence
  Description of Artificial Sequence: Synthetic polypeptide
  XENP022860 [ICOS]_H0_L0.42_Fab_His Light Chain
DIQMTQSPSSVSASVGDRVTITCQASQDISSYLAWYQQKPGKAPKLLIYVASSLQSGVPSRFSGSGSGTDFTLTISSLQPEDFATYYCQQAESFPWTFGQGTKVEIKRTVAAPSVFIFPPSDEQLKSGTASVVCLLNNFYPREAKVQWKVDNALQSGNSQESVTEQDSKDSTYSLSSTLTLSKADYEKHKVYACEVTHQGLSSPVTKSFNRGEC

SEQ ID NO: 28017 - protein, 230 aa, Artificial Sequence; identical to SEQ ID NO: 27869
  Description of Artificial Sequence: Synthetic polypeptide
  XENP022861 [ICOS]_H0_L0.43_Fab_His Heavy Chain

SEQ ID NO: 28018 - protein, 214 aa, Artificial Sequence
  Description of Artificial Sequence: Synthetic polypeptide
  XENP022861 [ICOS]_H0_L0.43_Fab_His Light Chain
DIQMTQSPSSVSASVGDRVTITCQASQDISSYLAWYQQKPGKAPKLLIYAASSLQSGVPSRFSGSGSGTDFTLTISSLQPEDFATYYCQQAESFPWTFGQGTKVEIKRTVAAPSVFIFPPSDEQLKSGTASVVCLLNNFYPREAKVQWKVDNALQSGNSQESVTEQDSKDSTYSLSSTLTLSKADYEKHKVYACEVTHQGLSSPVTKSFNRGEC

SEQ ID NO: 28019 - protein, 230 aa, Artificial Sequence; identical to SEQ ID NO: 27869
  Description of Artificial Sequence: Synthetic polypeptide
  XENP022862 [ICOS]_H0_L0.44_Fab_His Heavy Chain

SEQ ID NO: 28020 - protein, 214 aa, Artificial Sequence
  Description of Artificial Sequence: Synthetic polypeptide
  XENP022862 [ICOS]_H0_L0.44_Fab_His Light Chain
DIQMTQSPSSVSASVGDRVTITCQASQDISSYLAWYQQKPGKAPKLLIYAASSLQSGVPSRFSGSGSGTDFTLTISSLQPEDFATYYCQQANSFPWTFGQGTKVEIKRTVAAPSVFIFPPSDEQLKSGTASVVCLLNNFYPREAKVQWKVDNALQSGNSQESVTEQDSKDSTYSLSSTLTLSKADYEKHKVYACEVTHQGLSSPVTKSFNRGEC

SEQ ID NO: 28021 - protein, 230 aa, Artificial Sequence
  Description of Artificial Sequence: Synthetic polypeptide
  XENP022863 [ICOS]_H0.35_L0.38_Fab_His Heavy Chain
QVQLVQSGAEVKKPGASVKVSCKASGYTFTGYYMHWVRQAPGQGLEWMGWINPHSGGTNYAQKFQGRVTMTRDTSISTAYMELSRLRSDDTAVYYCARTYYYDTSGYYHDAFDVWGQGTMVTVSSASTKGPSVFPLAPSSKSTSGGTAALGCLVKDYFPEPVTVSWNSGALTSGVHTFPAVLQSSGLYSLSSVVTVPSSSLGTQTYICNVNHKPSNTKVDKKVEPKSCGS

SEQ ID NO: 28022 - protein, 214 aa, Artificial Sequence; identical to SEQ ID NO: 26557
  Description of Artificial Sequence: Synthetic polypeptide
  XENP022863 [ICOS]_H0.35_L0.38_Fab_His Light Chain

SEQ ID NO: 28023 - protein, 230 aa, Artificial Sequence; identical to SEQ ID NO: 28021
  Description of Artificial Sequence: Synthetic polypeptide
  XENP022864 [ICOS]_H0.35_L0.42_Fab_His Heavy Chain

SEQ ID NO: 28024 - protein, 214 aa, Artificial Sequence; identical to SEQ ID NO: 28016
  Description of Artificial Sequence: Synthetic polypeptide
  XENP022864 [ICOS]_H0.35_L0.42_Fab_His Light Chain

SEQ ID NO: 28025 - protein, 230 aa, Artificial Sequence; identical to SEQ ID NO: 28021
  Description of Artificial Sequence: Synthetic polypeptide
  XENP022865 [ICOS]_H0.35_L0.43_Fab_His Heavy Chain

SEQ ID NO: 28026 - protein, 214 aa, Artificial Sequence; identical to SEQ ID NO: 28018
  Description of Artificial Sequence: Synthetic polypeptide
  XENP022865 [ICOS]_H0.35_L0.43_Fab_His Light Chain

SEQ ID NO: 28027 - protein, 230 aa, Artificial Sequence; identical to SEQ ID NO: 28021
  Description of Artificial Sequence: Synthetic polypeptide
  XENP022866 [ICOS]_H0.35_L0.44_Fab_His Heavy Chain

SEQ ID NO: 28028 - protein, 214 aa, Artificial Sequence; identical to SEQ ID NO: 28020
  Description of Artificial Sequence: Synthetic polypeptide
  XENP022866 [ICOS]_H0.35_L0.44_Fab_His Light Chain

SEQ ID NO: 28029 - protein, 230 aa, Artificial Sequence
  Description of Artificial Sequence: Synthetic polypeptide
  XENP022867 [ICOS]_H0.61_L0.38_Fab_His Heavy Chain
QVQLVQSGAEVKKPGASVKVSCKASGYTFTGYYMHWVRQAPGQGLEWMGIINPHSGGTNYAQKFQGRVTMTRDTSISTAYMELSRLRSDDTAVYYCARTYYYDTSGYYHDAFDVWGQGTMVTVSSASTKGPSVFPLAPSSKSTSGGTAALGCLVKDYFPEPVTVSWNSGALTSGVHTFPAVLQSSGLYSLSSVVTVPSSSLGTQTYICNVNHKPSNTKVDKKVEPKSCGS

SEQ ID NO: 28030 - protein, 214 aa, Artificial Sequence; identical to SEQ ID NO: 26557
  Description of Artificial Sequence: Synthetic polypeptide
  XENP022867 [ICOS]_H0.61_L0.38_Fab_His Light Chain

SEQ ID NO: 28031 - protein, 230 aa, Artificial Sequence; identical to SEQ ID NO: 28029
  Description of Artificial Sequence: Synthetic polypeptide
  XENP022868 [ICOS]_H0.61_L0.42_Fab_His Heavy Chain

SEQ ID NO: 28032 - protein, 214 aa, Artificial Sequence; identical to SEQ ID NO: 28016
  Description of Artificial Sequence: Synthetic polypeptide
  XENP022868 [ICOS]_H0.61_L0.42_Fab_His Light Chain

SEQ ID NO: 28033 - protein, 230 aa, Artificial Sequence; identical to SEQ ID NO: 28029
  Description of Artificial Sequence: Synthetic polypeptide
  XENP022869 [ICOS]_H0.61_L0.43_Fab_His Heavy Chain

SEQ ID NO: 28034 - protein, 214 aa, Artificial Sequence; identical to SEQ ID NO: 28018
  Description of Artificial Sequence: Synthetic polypeptide
  XENP022869 [ICOS]_H0.61_L0.43_Fab_His Light Chain

SEQ ID NO: 28035 - protein, 230 aa, Artificial Sequence; identical to SEQ ID NO: 28029
  Description of Artificial Sequence: Synthetic polypeptide
  XENP022870 [ICOS]_H0.61_L0.44_Fab_His Heavy Chain

SEQ ID NO: 28036 - protein, 214 aa, Artificial Sequence; identical to SEQ ID NO: 28020
  Description of Artificial Sequence: Synthetic polypeptide
  XENP022870 [ICOS]_H0.61_L0.44_Fab_His Light Chain

SEQ ID NO: 28037 - protein, 230 aa, Artificial Sequence; identical to SEQ ID NO: 27917
  Description of Artificial Sequence: Synthetic polypeptide
  XENP022871 [ICOS]_H0.24_L0.38_Fab_His Heavy Chain

SEQ ID NO: 28038 - protein, 214 aa, Artificial Sequence; identical to SEQ ID NO: 26557
  Description of Artificial Sequence: Synthetic polypeptide
  XENP022871 [ICOS]_H0.24_L0.38_Fab_His Light Chain

SEQ ID NO: 28039 - protein, 230 aa, Artificial Sequence
  Description of Artificial Sequence: Synthetic polypeptide
  XENP022872 [ICOS]_H0.37_L0.38_Fab_His Heavy Chain
QVQLVQSGAEVKKPGASVKVSCKASGYTFTGYYMHWVRQAPGQGLEWMGWINPHSGGTNYAQKFQGRVTMTRDTSISTAYMELSSLRSEDTAVYYCARTYYYDTSGYYHDAFDVWGQGTMVTVSSASTKGPSVFPLAPSSKSTSGGTAALGCLVKDYFPEPVTVSWNSGALTSGVHTFPAVLQSSGLYSLSSVVTVPSSSLGTQTYICNVNHKPSNTKVDKKVEPKSCGS

SEQ ID NO: 28040 - protein, 214 aa, Artificial Sequence; identical to SEQ ID NO: 26557
  Description of Artificial Sequence: Synthetic polypeptide
  XENP022872 [ICOS]_H0.37_L0.38_Fab_His Light Chain

SEQ ID NO: 28041 - protein, 230 aa, Artificial Sequence
  Description of Artificial Sequence: Synthetic polypeptide
  XENP022873 [ICOS]_H0.40_L0.38_Fab_His Heavy Chain
QVQLVQSGAEVKKPGASVKVSCKASGYTFTGYYMHWVRQAPGQGLEWMGWINPHSGETNYAQKFQGRVTMTRDTSISTAYMELSSLRSEDTAVYYCARTYYYDTSGYYHDAFDVWGQGTMVTVSSASTKGPSVFPLAPSSKSTSGGTAALGCLVKDYFPEPVTVSWNSGALTSGVHTFPAVLQSSGLYSLSSVVTVPSSSLGTQTYICNVNHKPSNTKVDKKVEPKSCGS

SEQ ID NO: 28042 - protein, 214 aa, Artificial Sequence; identical to SEQ ID NO: 26557
  Description of Artificial Sequence: Synthetic polypeptide
  XENP022873 [ICOS]_H0.40_L0.38_Fab_His Light Chain

SEQ ID NO: 28043 - protein, 230 aa, Artificial Sequence
  Description of Artificial Sequence: Synthetic polypeptide
  XENP022874 [ICOS]_H0.44_L0.38_Fab_His Heavy Chain
QVQLVQSGAEVKKPGASVKVSCKASGYTFTGYYMHWVRQAPGQGLEWMGWINPHSGGTNYAQKFQGRVTITADESTSTAYMELSRLRSDDTAVYYCARTYYYDTSGYYHDAFDVWGQGTMVTVSSASTKGPSVFPLAPSSKSTSGGTAALGCLVKDYFPEPVTVSWNSGALTSGVHTFPAVLQSSGLYSLSSVVTVPSSSLGTQTYICNVNHKPSNTKVDKKVEPKSCGS

SEQ ID NO: 28044 - protein, 214 aa, Artificial Sequence; identical to SEQ ID NO: 26557
  Description of Artificial Sequence: Synthetic polypeptide
  XENP022874 [ICOS]_H0.44_L0.38_Fab_His Light Chain

SEQ ID NO: 28045 - protein, 230 aa, Artificial Sequence
  Description of Artificial Sequence: Synthetic polypeptide
  XENP022875 [ICOS]_H0.56_L0.38_Fab_His Heavy Chain
QVQLVQSGAEVKKPGASVKVSCKASGYTFTGYYMHWVRQAPGQGLEWMGIINPHSGGTNYAQKFQGRVTMTRDTSISTAYMELSRLRSDDTAVYYCARTYYYDTSGYYHDAFDIWGQGTMVTVSSASTKGPSVFPLAPSSKSTSGGTAALGCLVKDYFPEPVTVSWNSGALTSGVHTFPAVLQSSGLYSLSSVVTVPSSSLGTQTYICNVNHKPSNTKVDKKVEPKSCGS

SEQ ID NO: 28046 - protein, 214 aa, Artificial Sequence; identical to SEQ ID NO: 26557
  Description of Artificial Sequence: Synthetic polypeptide
  XENP022875 [ICOS]_H0.56_L0.38_Fab_His Light Chain

SEQ ID NO: 28047 - protein, 230 aa, Artificial Sequence
  Description of Artificial Sequence: Synthetic polypeptide
  XENP022876 [ICOS]_H0.62_L0.38_Fab_His Heavy Chain
QVQLVQSGAEVKKPGASVKVSCKASGYTFTGYYMHWVRQAPGQGLEWMGWINPHSGGTNYAQKFQGRVTMTEDTSTDTAYMELSRLRSDDTAVYYCARTYYYDTSGYYHDAFDVWGQGTMVTVSSASTKGPSVFPLAPSSKSTSGGTAALGCLVKDYFPEPVTVSWNSGALTSGVHTFPAVLQSSGLYSLSSVVTVPSSSLGTQTYICNVNHKPSNTKVDKKVEPKSCGS

SEQ ID NO: 28048 - protein, 214 aa, Artificial Sequence; identical to SEQ ID NO: 26557
  Description of Artificial Sequence: Synthetic polypeptide
  XENP022876 [ICOS]_H0.62_L0.38_Fab_His Light Chain

SEQ ID NO: 28049 - protein, 230 aa, Artificial Sequence; identical to SEQ ID NO: 28021
  Description of Artificial Sequence: Synthetic polypeptide
  XENP022929 [ICOS]_H0.35_L0.36_Fab_His Heavy Chain

SEQ ID NO: 28050 - protein, 214 aa, Artificial Sequence; identical to SEQ ID NO: 26517
  Description of Artificial Sequence: Synthetic polypeptide
  XENP022929 [ICOS]_H0.35_L0.36_Fab_His Light Chain

SEQ ID NO: 28051 - protein, 230 aa, Artificial Sequence; identical to SEQ ID NO: 28029
  Description of Artificial Sequence: Synthetic polypeptide
  XENP022930 [ICOS]_H0.61_L0.36_Fab_His Heavy Chain

SEQ ID NO: 28052 - protein, 214 aa, Artificial Sequence; identical to SEQ ID NO: 26517
  Description of Artificial Sequence: Synthetic polypeptide
  XENP022930 [ICOS]_H0.61_L0.36_Fab_His Light Chain

SEQ ID NO: 28053 - protein, 230 aa, Artificial Sequence; identical to SEQ ID NO: 27917
  Description of Artificial Sequence: Synthetic polypeptide
  XENP022938 [ICOS]_H0.24_L0.37_Fab_His Heavy Chain

SEQ ID NO: 28054 - protein, 214 aa, Artificial Sequence; identical to SEQ ID NO: 26537
  Description of Artificial Sequence: Synthetic polypeptide
  XENP022938 [ICOS]_H0.24_L0.37_Fab_His Light Chain

SEQ ID NO: 28055 - protein, 230 aa, Artificial Sequence; identical to SEQ ID NO: 28039
  Description of Artificial Sequence: Synthetic polypeptide
  XENP022939 [ICOS]_H0.37_L0.37_Fab_His Heavy Chain

SEQ ID NO: 28056 - protein, 214 aa, Artificial Sequence; identical to SEQ ID NO: 26537
  Description of Artificial Sequence: Synthetic polypeptide
  XENP022939 [ICOS]_H0.37_L0.37_Fab_His Light Chain

SEQ ID NO: 28057 - protein, 230 aa, Artificial Sequence; identical to SEQ ID NO: 28041
  Description of Artificial Sequence: Synthetic polypeptide
  XENP022940 [ICOS]_H0.40_L0.37_Fab_His Heavy Chain

SEQ ID NO: 28058 - protein, 214 aa, Artificial Sequence; identical to SEQ ID NO: 26537
  Description of Artificial Sequence: Synthetic polypeptide
  XENP022940 [ICOS]_H0.40_L0.37_Fab_His Light Chain

SEQ ID NO: 28059 - protein, 230 aa, Artificial Sequence; identical to SEQ ID NO: 28043
  Description of Artificial Sequence: Synthetic polypeptide
  XENP022941 [ICOS]_H0.44_L0.37_Fab_His Heavy Chain

SEQ ID NO: 28060 - protein, 214 aa, Artificial Sequence; identical to SEQ ID NO: 26537
  Description of Artificial Sequence: Synthetic polypeptide
  XENP022941 [ICOS]_H0.44_L0.37_Fab_His Light Chain

SEQ ID NO: 28061 - protein, 230 aa, Artificial Sequence; identical to SEQ ID NO: 28045
  Description of Artificial Sequence: Synthetic polypeptide
  XENP022942 [ICOS]_H0.56_L0.37_Fab_His Heavy Chain

SEQ ID NO: 28062 - protein, 214 aa, Artificial Sequence; identical to SEQ ID NO: 26537
  Description of Artificial Sequence: Synthetic polypeptide
  XENP022942 [ICOS]_H0.56_L0.37_Fab_His Light Chain

SEQ ID NO: 28063 - protein, 230 aa, Artificial Sequence; identical to SEQ ID NO: 28047
  Description of Artificial Sequence: Synthetic polypeptide
  XENP022943 [ICOS]_H0.62_L0.37_Fab_His Heavy Chain

SEQ ID NO: 28064 - protein, 214 aa, Artificial Sequence; identical to SEQ ID NO: 26537
  Description of Artificial Sequence: Synthetic polypeptide
  XENP022943 [ICOS]_H0.62_L0.37_Fab_His Light Chain

SEQ ID NO: 28065 - protein, 230 aa, Artificial Sequence; identical to SEQ ID NO: 28021
  Description of Artificial Sequence: Synthetic polypeptide
  XENP022944 [ICOS]_H0.35_L0.34_Fab_His Heavy Chain

SEQ ID NO: 28066 - protein, 214 aa, Artificial Sequence; identical to SEQ ID NO: 26497
  Description of Artificial Sequence: Synthetic polypeptide
  XENP022944 [ICOS]_H0.35_L0.34_Fab_His Light Chain

SEQ ID NO: 28067 - protein, 230 aa, Artificial Sequence; identical to SEQ ID NO: 28021
  Description of Artificial Sequence: Synthetic polypeptide
  XENP022945 [ICOS]_H0.35_L0.35_Fab_His Heavy Chain

SEQ ID NO: 28068 - protein, 214 aa, Artificial Sequence; identical to SEQ ID NO: 28008
  Description of Artificial Sequence: Synthetic polypeptide
  XENP022945 [ICOS]_H0.35_L0.35_Fab_His Light Chain

SEQ ID NO: 28069 - protein, 230 aa, Artificial Sequence; identical to SEQ ID NO: 28021
  Description of Artificial Sequence: Synthetic polypeptide
  XENP022946 [ICOS]_H0.35_L0.37_Fab_His Heavy Chain

SEQ ID NO: 28070 - protein, 214 aa, Artificial Sequence; identical to SEQ ID NO: 26537
  Description of Artificial Sequence: Synthetic polypeptide
  XENP022946 [ICOS]_H0.35_L0.37_Fab_His Light Chain

SEQ ID NO: 28071 - protein, 230 aa, Artificial Sequence; identical to SEQ ID NO: 28029
  Description of Artificial Sequence: Synthetic polypeptide
  XENP022947 [ICOS]_H0.61_L0.34_Fab_His Heavy Chain

SEQ ID NO: 28072 - protein, 214 aa, Artificial Sequence; identical to SEQ ID NO: 26497
  Description of Artificial Sequence: Synthetic polypeptide
  XENP022947 [ICOS]_H0.61_L0.34_Fab_His Light Chain

SEQ ID NO: 28073 - protein, 230 aa, Artificial Sequence; identical to SEQ ID NO: 28029
  Description of Artificial Sequence: Synthetic polypeptide
  XENP022948 [ICOS]_H0.61_L0.35_Fab_His Heavy Chain

SEQ ID NO: 28074 - protein, 214 aa, Artificial Sequence; identical to SEQ ID NO: 28008
  Description of Artificial Sequence: Synthetic polypeptide
  XENP022948 [ICOS]_H0.61_L0.35_Fab_His Light Chain

SEQ ID NO: 28075 - protein, 230 aa, Artificial Sequence; identical to SEQ ID NO: 28029
  Description of Artificial Sequence: Synthetic polypeptide
  XENP022949 [ICOS]_H0.61_L0.37_Fab_His Heavy Chain

SEQ ID NO: 28076 - protein, 214 aa, Artificial Sequence; identical to SEQ ID NO: 26537
  Description of Artificial Sequence: Synthetic polypeptide
  XENP022949 [ICOS]_H0.61_L0.37_Fab_His Light Chain

SEQ ID NO: 28077 - protein, 230 aa, Artificial Sequence; identical to SEQ ID NO: 28039
  Description of Artificial Sequence: Synthetic polypeptide
  XENP023086 [ICOS]_H0.37_L0_Fab_His Heavy Chain

SEQ ID NO: 28078 - protein, 214 aa, Artificial Sequence; identical to SEQ ID NO: 26297
  Description of Artificial Sequence: Synthetic polypeptide
  XENP023086 [ICOS]_H0.37_L0_Fab_His Light Chain

SEQ ID NO: 28079 - protein, 230 aa, Artificial Sequence
  Description of Artificial Sequence: Synthetic polypeptide
  XENP023087 [ICOS]_H0.64_L0_Fab_His Heavy Chain
QVQLVQSGAEVKKPGASVKVSCKASGYTFTGYYMHWVRQAPGQGLEWMGWINPHSGGTNYAQKFQGRVTMTEDTSTDTAYMELSSLRSEDTAVYYCARTYYYDTSGYYHDAFDVWGQGTMVTVSSASTKGPSVFPLAPSSKSTSGGTAALGCLVKDYFPEPVTVSWNSGALTSGVHTFPAVLQSSGLYSLSSVVTVPSSSLGTQTYICNVNHKPSNTKVDKKVEPKSCGS

SEQ ID NO: 28080 - protein, 214 aa, Artificial Sequence; identical to SEQ ID NO: 26297
  Description of Artificial Sequence: Synthetic polypeptide
  XENP023087 [ICOS]_H0.64_L0_Fab_His Light Chain

SEQ ID NO: 28081 - protein, 230 aa, Artificial Sequence
  Description of Artificial Sequence: Synthetic polypeptide
  XENP023088 [ICOS]_H0.66_L0_Fab_His Heavy Chain
QVQLVQSGAEVKKPGASVKVSCKASGYTFTGYYMHWVRQAPGQGLEWMGWINPHSGETIYAQKFQGRVTMTRDTSISTAYMELSSLRSEDTAVYYCARTYYYDTSGYYHDAFDVWGQGTMVTVSSASTKGPSVFPLAPSSKSTSGGTAALGCLVKDYFPEPVTVSWNSGALTSGVHTFPAVLQSSGLYSLSSVVTVPSSSLGTQTYICNVNHKPSNTKVDKKVEPKSCGS

SEQ ID NO: 28082 - protein, 214 aa, Artificial Sequence; identical to SEQ ID NO: 26297
  Description of Artificial Sequence: Synthetic polypeptide
  XENP023088 [ICOS]_H0.66_L0_Fab_His Light Chain

SEQ ID NO: 28083 - protein, 230 aa, Artificial Sequence
  Description of Artificial Sequence: Synthetic polypeptide
  XENP023089 [ICOS]_H0.67_L0_Fab_His Heavy Chain
QVQLVQSGAEVKKPGASVKVSCKASGYTFTGYYMHWVRQAPGQGLEWMGWINPHSGETIYAQKFQGRVTMTEDTSTDTAYMELSSLRSEDTAVYYCARTYYYDTSGYYHDAFDVWGQGTMVTVSSASTKGPSVFPLAPSSKSTSGGTAALGCLVKDYFPEPVTVSWNSGALTSGVHTFPAVLQSSGLYSLSSVVTVPSSSLGTQTYICNVNHKPSNTKVDKKVEPKSCGS

SEQ ID NO: 28084 - protein, 214 aa, Artificial Sequence; identical to SEQ ID NO: 26297
  Description of Artificial Sequence: Synthetic polypeptide
  XENP023089 [ICOS]_H0.67_L0_Fab_His Light Chain

SEQ ID NO: 28085 - protein, 230 aa, Artificial Sequence; identical to SEQ ID NO: 28081
  Description of Artificial Sequence: Synthetic polypeptide
  XENP023409 [ICOS]_H0.66_L0.34_Fab_His Heavy Chain

SEQ ID NO: 28086 - protein, 214 aa, Artificial Sequence; identical to SEQ ID NO: 26497
  Description of Artificial Sequence: Synthetic polypeptide
  XENP023409 [ICOS]_H0.66_L0.34_Fab_His Light Chain

SEQ ID NO: 28087 - protein, 454 aa, Artificial Sequence; identical to SEQ ID NO: 26442
  Description of Artificial Sequence: Synthetic polypeptide
  XENP020266 [ICOS]_H0L0 one-arm mAb Fab-Fc Heavy Chain

SEQ ID NO: 28088 - protein, 231 aa, Artificial Sequence; identical to SEQ ID NO: 27198
  Description of Artificial Sequence: Synthetic polypeptide
  XENP020266 [ICOS]_H0L0 one-arm mAb Fc-only Heavy Chain

SEQ ID NO: 28089 - protein, 214 aa, Artificial Sequence; identical to SEQ ID NO: 26297
  Description of Artificial Sequence: Synthetic polypeptide
  XENP020266 [ICOS]_H0L0 one-arm mAb Light Chain

SEQ ID NO: 28090 - protein, 454 aa, Artificial Sequence; identical to SEQ ID NO: 26442
  Description of Artificial Sequence: Synthetic polypeptide
  XENP022439 [ICOS]_H0_L0.5 one-arm mAb Fab-Fc Heavy Chain

SEQ ID NO: 28091 - protein, 231 aa, Artificial Sequence; identical to SEQ ID NO: 27198
  Description of Artificial Sequence: Synthetic polypeptide
  XENP022439 [ICOS]_H0_L0.5 one-arm mAb Fc-only Heavy Chain

SEQ ID NO: 28092 - protein, 214 aa, Artificial Sequence; identical to SEQ ID NO: 27243
  Description of Artificial Sequence: Synthetic polypeptide
  XENP022439 [ICOS]_H0_L0.5 one-arm mAb Light Chain

SEQ ID NO: 28093 - protein, 454 aa, Artificial Sequence; identical to SEQ ID NO: 26442
  Description of Artificial Sequence: Synthetic polypeptide
  XENP022440 [ICOS]_H0_L0.7 one-arm mAb Fab-Fc Heavy Chain

SEQ ID NO: 28094 - protein, 231 aa, Artificial Sequence; identical to SEQ ID NO: 27198
  Description of Artificial Sequence: Synthetic polypeptide
  XENP022440 [ICOS]_H0_L0.7 one-arm mAb Fc-only Heavy Chain

SEQ ID NO: 28095 - protein, 214 aa, Artificial Sequence; identical to SEQ ID NO: 26477
  Description of Artificial Sequence: Synthetic polypeptide
  XENP022440 [ICOS]_H0_L0.7 one-arm mAb Light Chain

SEQ ID NO: 28096 - protein, 454 aa, Artificial Sequence; identical to SEQ ID NO: 26442
  Description of Artificial Sequence: Synthetic polypeptide
  XENP022441 [ICOS]_H0_L0.9 one-arm mAb Fab-Fc Heavy Chain

SEQ ID NO: 28097 - protein, 231 aa, Artificial Sequence; identical to SEQ ID NO: 27198
  Description of Artificial Sequence: Synthetic polypeptide
  XENP022441 [ICOS]_H0_L0.9 one-arm mAb Fc-only Heavy Chain

SEQ ID NO: 28098 - protein, 214 aa, Artificial Sequence; identical to SEQ ID NO: 27265
  Description of Artificial Sequence: Synthetic polypeptide
  XENP022441 [ICOS]_H0_L0.9 one-arm mAb Light Chain

SEQ ID NO: 28099 - protein, 454 aa, Artificial Sequence; identical to SEQ ID NO: 26442
  Description of Artificial Sequence: Synthetic polypeptide
  XENP022442 [ICOS]_H0_L0.10 one-arm mAb Fab-Fc Heavy Chain

SEQ ID NO: 28100 - protein, 231 aa, Artificial Sequence; identical to SEQ ID NO: 27198
  Description of Artificial Sequence: Synthetic polypeptide
  XENP022442 [ICOS]_H0_L0.10 one-arm mAb Fc-only Heavy Chain

SEQ ID NO: 28101 - protein, 214 aa, Artificial Sequence; identical to SEQ ID NO: 27276
  Description of Artificial Sequence: Synthetic polypeptide
  XENP022442 [ICOS]_H0_L0.10 one-arm mAb Light Chain

SEQ ID NO: 28102 - protein, 454 aa, Artificial Sequence; identical to SEQ ID NO: 26442
  Description of Artificial Sequence: Synthetic polypeptide
  XENP022443 [ICOS]_H0_L0.14 one-arm mAb Fab-Fc Heavy Chain

SEQ ID NO: 28103 - protein, 231 aa, Artificial Sequence; identical to SEQ ID NO: 27198
  Description of Artificial Sequence: Synthetic polypeptide
  XENP022443 [ICOS]_H0_L0.14 one-arm mAb Fc-only Heavy Chain

SEQ ID NO: 28104 - protein, 214 aa, Artificial Sequence; identical to SEQ ID NO: 27287
  Description of Artificial Sequence: Synthetic polypeptide
  XENP022443 [ICOS]_H0_L0.14 one-arm mAb Light Chain

SEQ ID NO: 28105 - protein, 454 aa, Artificial Sequence; identical to SEQ ID NO: 26442
  Description of Artificial Sequence: Synthetic polypeptide
  XENP022444 [ICOS]_H0_L0.15 one-arm mAb Fab-Fc Heavy Chain

SEQ ID NO: 28106 - protein, 231 aa, Artificial Sequence; identical to SEQ ID NO: 27198
  Description of Artificial Sequence: Synthetic polypeptide
  XENP022444 [ICOS]_H0_L0.15 one-arm mAb Fc-only Heavy Chain

SEQ ID NO: 28107 - protein, 214 aa, Artificial Sequence; identical to SEQ ID NO: 27298
  Description of Artificial Sequence: Synthetic polypeptide
  XENP022444 [ICOS]_H0_L0.15 one-arm mAb Light Chain

SEQ ID NO: 28108 - protein, 454 aa, Artificial Sequence; identical to SEQ ID NO: 26442
  Description of Artificial Sequence: Synthetic polypeptide
  XENP022445 [ICOS]_H0_L0.20 one-arm mAb Fab-Fc Heavy Chain

SEQ ID NO: 28109 - protein, 231 aa, Artificial Sequence; identical to SEQ ID NO: 27198
  Description of Artificial Sequence: Synthetic polypeptide
  XENP022445 [ICOS]_H0_L0.20 one-arm mAb Fc-only Heavy Chain

SEQ ID NO: 28110 - protein, 214 aa, Artificial Sequence; identical to SEQ ID NO: 27309
  Description of Artificial Sequence: Synthetic polypeptide
  XENP022445 [ICOS]_H0_L0.20 one-arm mAb Light Chain

SEQ ID NO: 28111 - protein, 454 aa, Artificial Sequence; identical to SEQ ID NO: 26442
  Description of Artificial Sequence: Synthetic polypeptide
  XENP022749 [ICOS]_H0_L0.21 one-arm mAb Fab-Fc Heavy Chain

SEQ ID NO: 28112 - protein, 231 aa, Artificial Sequence; identical to SEQ ID NO: 27198
  Description of Artificial Sequence: Synthetic polypeptide
  XENP022749 [ICOS]_H0_L0.21 one-arm mAb Fc-only Heavy Chain

SEQ ID NO: 28113 - protein, 214 aa, Artificial Sequence; identical to SEQ ID NO: 27980
  Description of Artificial Sequence: Synthetic polypeptide
  XENP022749 [ICOS]_H0_L0.21 one-arm mAb Light Chain

SEQ ID NO: 28114 - protein, 454 aa, Artificial Sequence; identical to SEQ ID NO: 26442
  Description of Artificial Sequence: Synthetic polypeptide
  XENP022750 [ICOS]_H0_L0.22 one-arm mAb Fab-Fc Heavy Chain

SEQ ID NO: 28115 - protein, 231 aa, Artificial Sequence; identical to SEQ ID NO: 27198
  Description of Artificial Sequence: Synthetic polypeptide
  XENP022750 [ICOS]_H0_L0.22 one-arm mAb Fc-only Heavy Chain

SEQ ID NO: 28116 - protein, 214 aa, Artificial Sequence; identical to SEQ ID NO: 27982
  Description of Artificial Sequence: Synthetic polypeptide
  XENP022750 [ICOS]_H0_L0.22 one-arm mAb Light Chain

SEQ ID NO: 28117 - protein, 454 aa, Artificial Sequence; identical to SEQ ID NO: 26442
  Description of Artificial Sequence: Synthetic polypeptide
  XENP022751 [ICOS]_H0_L0.23 one-arm mAb Fab-Fc Heavy Chain

SEQ ID NO: 28118 - protein, 231 aa, Artificial Sequence; identical to SEQ ID NO: 27198
  Description of Artificial Sequence: Synthetic polypeptide
  XENP022751 [ICOS]_H0_L0.23 one-arm mAb Fc-only Heavy Chain

SEQ ID NO: 28119 - protein, 214 aa, Artificial Sequence; identical to SEQ ID NO: 27984
  Description of Artificial Sequence: Synthetic polypeptide
  XENP022751 [ICOS]_H0_L0.23 one-arm mAb Light Chain

SEQ ID NO: 28120 - protein, 454 aa, Artificial Sequence; identical to SEQ ID NO: 26442
  Description of Artificial Sequence: Synthetic polypeptide
  XENP022752 [ICOS]_H0_L0.24 one-arm mAb Fab-Fc Heavy Chain

SEQ ID NO: 28121 - protein, 231 aa, Artificial Sequence; identical to SEQ ID NO: 27198
  Description of Artificial Sequence: Synthetic polypeptide
  XENP022752 [ICOS]_H0_L0.24 one-arm mAb Fc-only Heavy Chain

SEQ ID NO: 28122 - protein, 214 aa, Artificial Sequence; identical to SEQ ID NO: 27986
  Description of Artificial Sequence: Synthetic polypeptide
  XENP022752 [ICOS]_H0_L0.24 one-arm mAb Light Chain

SEQ ID NO: 28123 - protein, 454 aa, Artificial Sequence; identical to SEQ ID NO: 26442
  Description of Artificial Sequence: Synthetic polypeptide
  XENP022753 [ICOS]_H0_L0.25 one-arm mAb Fab-Fc Heavy Chain

SEQ ID NO: 28124 - protein, 231 aa, Artificial Sequence; identical to SEQ ID NO: 27198
  Description of Artificial Sequence: Synthetic polypeptide
  XENP022753 [ICOS]_H0_L0.25 one-arm mAb Fc-only Heavy Chain

SEQ ID NO: 28125 - protein, 214 aa, Artificial Sequence; identical to SEQ ID NO: 27988
  Description of Artificial Sequence: Synthetic polypeptide
  XENP022753 [ICOS]_H0_L0.25 one-arm mAb Light Chain

SEQ ID NO: 28126 - protein, 454 aa, Artificial Sequence; identical to SEQ ID NO: 26442
  Description of Artificial Sequence: Synthetic polypeptide
  XENP022754 [ICOS]_H0_L0.26 one-arm mAb Fab-Fc Heavy Chain

SEQ ID NO: 28127 - protein, 231 aa, Artificial Sequence; identical to SEQ ID NO: 27198
  Description of Artificial Sequence: Synthetic polypeptide
  XENP022754 [ICOS]_H0_L0.26 one-arm mAb Fc-only Heavy Chain

SEQ ID NO: 28128 - protein, 214 aa, Artificial Sequence; identical to SEQ ID NO: 27990
  Description of Artificial Sequence: Synthetic polypeptide
  XENP022754 [ICOS]_H0_L0.26 one-arm mAb Light Chain

SEQ ID NO: 28129 - protein, 454 aa, Artificial Sequence; identical to SEQ ID NO: 26442
  Description of Artificial Sequence: Synthetic polypeptide
  XENP022755 [ICOS]_H0_L0.27 one-arm mAb Fab-Fc Heavy Chain

SEQ ID NO: 28130 - protein, 231 aa, Artificial Sequence; identical to SEQ ID NO: 27198
  Description of Artificial Sequence: Synthetic polypeptide
  XENP022755 [ICOS]_H0_L0.27 one-arm mAb Fc-only Heavy Chain

SEQ ID NO: 28131 - protein, 214 aa, Artificial Sequence; identical to SEQ ID NO: 27992
  Description of Artificial Sequence: Synthetic polypeptide
  XENP022755 [ICOS]_H0_L0.27 one-arm mAb Light Chain

SEQ ID NO: 28132 - protein, 454 aa, Artificial Sequence; identical to SEQ ID NO: 26442
  Description of Artificial Sequence: Synthetic polypeptide
  XENP022756 [ICOS]_H0_L0.28 one-arm mAb Fab-Fc Heavy Chain

SEQ ID NO: 28133 - protein, 231 aa, Artificial Sequence; identical to SEQ ID NO: 27198
  Description of Artificial Sequence: Synthetic polypeptide
  XENP022756 [ICOS]_H0_L0.28 one-arm mAb Fc-only Heavy Chain

SEQ ID NO: 28134 - protein, 214 aa, Artificial Sequence; identical to SEQ ID NO: 27994
  Description of Artificial Sequence: Synthetic polypeptide
  XENP022756 [ICOS]_H0_L0.28 one-arm mAb Light Chain

SEQ ID NO: 28135 - protein, 454 aa, Artificial Sequence; identical to SEQ ID NO: 26442
  Description of Artificial Sequence: Synthetic polypeptide
  XENP022757 [ICOS]_H0_L0.29 one-arm mAb Fab-Fc Heavy Chain

SEQ ID NO: 28136 - protein, 231 aa, Artificial Sequence; identical to SEQ ID NO: 27198
  Description of Artificial Sequence: Synthetic polypeptide
  XENP022757 [ICOS]_H0_L0.29 one-arm mAb Fc-only Heavy Chain

SEQ ID NO: 28137 - protein, 214 aa, Artificial Sequence; identical to SEQ ID NO: 27996
  Description of Artificial Sequence: Synthetic polypeptide
  XENP022757 [ICOS]_H0_L0.29 one-arm mAb Light Chain

SEQ ID NO: 28138 - protein, 454 aa, Artificial Sequence; identical to SEQ ID NO: 26442
  Description of Artificial Sequence: Synthetic polypeptide
  XENP022758 [ICOS]_H0_L0.30 one-arm mAb Fab-Fc Heavy Chain

SEQ ID NO: 28139 - protein, 231 aa, Artificial Sequence; identical to SEQ ID NO: 27198
  Description of Artificial Sequence: Synthetic polypeptide
  XENP022758 [ICOS]_H0_L0.30 one-arm mAb Fc-only Heavy Chain

SEQ ID NO: 28140 - protein, 214 aa, Artificial Sequence; identical to SEQ ID NO: 27998
  Description of Artificial Sequence: Synthetic polypeptide
  XENP022758 [ICOS]_H0_L0.30 one-arm mAb Light Chain

SEQ ID NO: 28141 - protein, 454 aa, Artificial Sequence; identical to SEQ ID NO: 26442
  Description of Artificial Sequence: Synthetic polypeptide
  XENP022759 [ICOS]_H0_L0.31 one-arm mAb Fab-Fc Heavy Chain

SEQ ID NO: 28142 - protein, 231 aa, Artificial Sequence; identical to SEQ ID NO: 27198
  Description of Artificial Sequence: Synthetic polypeptide
  XENP022759 [ICOS]_H0_L0.31 one-arm mAb Fc-only Heavy Chain

SEQ ID NO: 28143 - protein, 214 aa, Artificial Sequence; identical to SEQ ID NO: 28000
  Description of Artificial Sequence: Synthetic polypeptide
  XENP022759 [ICOS]_H0_L0.31 one-arm mAb Light Chain

SEQ ID NO: 28144 - protein, 454 aa, Artificial Sequence; identical to SEQ ID NO: 26442
  Description of Artificial Sequence: Synthetic polypeptide
  XENP022760 [ICOS]_H0_L0.32 one-arm mAb Fab-Fc Heavy Chain

SEQ ID NO: 28145 - protein, 231 aa, Artificial Sequence; identical to SEQ ID NO: 27198
  Description of Artificial Sequence: Synthetic polypeptide
  XENP022760 [ICOS]_H0_L0.32 one-arm mAb Fc-only Heavy Chain

SEQ ID NO: 28146 - protein, 214 aa, Artificial Sequence; identical to SEQ ID NO: 28002
  Description of Artificial Sequence: Synthetic polypeptide
  XENP022760 [ICOS]_H0_L0.32 one-arm mAb Light Chain

SEQ ID NO: 28147 - protein, 454 aa, Artificial Sequence; identical to SEQ ID NO: 26442
  Description of Artificial Sequence: Synthetic polypeptide
  XENP022761 [ICOS]_H0_L0.33 one-arm mAb Fab-Fc Heavy Chain

SEQ ID NO: 28148 - protein, 231 aa, Artificial Sequence; identical to SEQ ID NO: 27198
  Description of Artificial Sequence: Synthetic polypeptide
  XENP022761 [ICOS]_H0_L0.33 one-arm mAb Fc-only Heavy Chain

SEQ ID NO: 28149 - protein, 214 aa, Artificial Sequence; identical to SEQ ID NO: 28004
  Description of Artificial Sequence: Synthetic polypeptide
  XENP022761 [ICOS]_H0_L0.33 one-arm mAb Light Chain

SEQ ID NO: 28150 - protein, 454 aa, Artificial Sequence; identical to SEQ ID NO: 26442
  Description of Artificial Sequence: Synthetic polypeptide
  XENP022762 [ICOS]_H0_L0.34 one-arm mAb Fab-Fc Heavy Chain

SEQ ID NO: 28151 - protein, 231 aa, Artificial Sequence; identical to SEQ ID NO: 27198
  Description of Artificial Sequence: Synthetic polypeptide
  XENP022762 [ICOS]_H0_L0.34 one-arm mAb Fc-only Heavy Chain

SEQ ID NO: 28152 - protein, 214 aa, Artificial Sequence; identical to SEQ ID NO: 26497
  Description of Artificial Sequence: Synthetic polypeptide
  XENP022762 [ICOS]_H0_L0.34 one-arm mAb Light Chain

SEQ ID NO: 28153 - protein, 454 aa, Artificial Sequence; identical to SEQ ID NO: 26442
  Description of Artificial Sequence: Synthetic polypeptide
  XENP022763 [ICOS]_H0_L0.35 one-arm mAb Fab-Fc Heavy Chain

SEQ ID NO: 28154 - protein, 231 aa, Artificial Sequence; identical to SEQ ID NO: 27198
  Description of Artificial Sequence: Synthetic polypeptide
  XENP022763 [ICOS]_H0_L0.35 one-arm mAb Fc-only Heavy Chain

SEQ ID NO: 28155 - protein, 214 aa, Artificial Sequence; identical to SEQ ID NO: 28008
  Description of Artificial Sequence: Synthetic polypeptide
  XENP022763 [ICOS]_H0_L0.35 one-arm mAb Light Chain

SEQ ID NO: 28156 - protein, 454 aa, Artificial Sequence; identical to SEQ ID NO: 26442
  Description of Artificial Sequence: Synthetic polypeptide
  XENP022764 [ICOS]_H0_L0.36 one-arm mAb Fab-Fc Heavy Chain

SEQ ID NO: 28157 - protein, 231 aa, Artificial Sequence; identical to SEQ ID NO: 27198
  Description of Artificial Sequence: Synthetic polypeptide
  XENP022764 [ICOS]_H0_L0.36 one-arm mAb Fc-only Heavy Chain

SEQ ID NO: 28158 - protein, 214 aa, Artificial Sequence; identical to SEQ ID NO: 26517
  Description of Artificial Sequence: Synthetic polypeptide
  XENP022764 [ICOS]_H0_L0.36 one-arm mAb Light Chain

SEQ ID NO: 28159 - protein, 454 aa, Artificial Sequence; identical to SEQ ID NO: 26442
  Description of Artificial Sequence: Synthetic polypeptide
  XENP022765 [ICOS]_H0_L0.37 one-arm mAb Fab-Fc Heavy Chain

SEQ ID NO: 28160 - protein, 231 aa, Artificial Sequence; identical to SEQ ID NO: 27198
  Description of Artificial Sequence: Synthetic polypeptide
  XENP022765 [ICOS]_H0_L0.37 one-arm mAb Fc-only Heavy Chain

SEQ ID NO: 28161 - protein, 214 aa, Artificial Sequence; identical to SEQ ID NO: 26537
  Description of Artificial Sequence: Synthetic polypeptide
  XENP022765 [ICOS]_H0_L0.37 one-arm mAb Light Chain

SEQ ID NO: 28162 - protein, 454 aa, Artificial Sequence; identical to SEQ ID NO: 26442
  Description of Artificial Sequence: Synthetic polypeptide
  XENP022766 [ICOS]_H0_L0.38 one-arm mAb Fab-Fc Heavy Chain

SEQ ID NO: 28163 - protein, 231 aa, Artificial Sequence; identical to SEQ ID NO: 27198
  Description of Artificial Sequence: Synthetic polypeptide
  XENP022766 [ICOS]_H0_L0.38 one-arm mAb Fc-only Heavy Chain

SEQ ID NO: 28164 - protein, 214 aa, Artificial Sequence; identical to SEQ ID NO: 26557
  Description of Artificial Sequence: Synthetic polypeptide
  XENP022766 [ICOS]_H0_L0.38 one-arm mAb Light Chain

SEQ ID NO: 28165 - protein, 454 aa, Artificial Sequence; identical to SEQ ID NO: 26442
  Description of Artificial Sequence: Synthetic polypeptide
  XENP022896 [ICOS]_H0_L0.42 one-arm mAb Fab-Fc Heavy Chain

SEQ ID NO: 28166 - protein, 231 aa, Artificial Sequence; identical to SEQ ID NO: 27198
  Description of Artificial Sequence: Synthetic polypeptide
  XENP022896 [ICOS]_H0_L0.42 one-arm mAb Fc-only Heavy Chain

SEQ ID NO: 28167 - protein, 214 aa, Artificial Sequence; identical to SEQ ID NO: 28016
  Description of Artificial Sequence: Synthetic polypeptide
  XENP022896 [ICOS]_H0_L0.42 one-arm mAb Light Chain

SEQ ID NO: 28168 - protein, 454 aa, Artificial Sequence; identical to SEQ ID NO: 26442
  Description of Artificial Sequence: Synthetic polypeptide
  XENP022901 [ICOS]_H0_L0.43 one-arm mAb Fab-Fc Heavy Chain

SEQ ID NO: 28169 - protein, 231 aa, Artificial Sequence; identical to SEQ ID NO: 27198
  Description of Artificial Sequence: Synthetic polypeptide
  XENP022901 [ICOS]_H0_L0.43 one-arm mAb Fc-only Heavy Chain

SEQ ID NO: 28170 - protein, 214 aa, Artificial Sequence; identical to SEQ ID NO: 28018
  Description of Artificial Sequence: Synthetic polypeptide
  XENP022901 [ICOS]_H0_L0.43 one-arm mAb Light Chain

SEQ ID NO: 28171 - protein, 454 aa, Artificial Sequence; identical to SEQ ID NO: 26442
  Description of Artificial Sequence: Synthetic polypeptide
  XENP022902 [ICOS]_H0_L0.44 one-arm mAb Fab-Fc Heavy Chain

SEQ ID NO: 28172 - protein, 231 aa, Artificial Sequence; identical to SEQ ID NO: 27198
  Description of Artificial Sequence: Synthetic polypeptide
  XENP022902 [ICOS]_H0_L0.44 one-arm mAb Fc-only Heavy Chain

SEQ ID NO: 28173 - protein, 214 aa, Artificial Sequence; identical to SEQ ID NO: 28020
  Description of Artificial Sequence: Synthetic polypeptide
  XENP022902 [ICOS]_H0_L0.44 one-arm mAb Light Chain

SEQ ID NO: 28174 - protein, 454 aa, Artificial Sequence
  Description of Artificial Sequence: Synthetic polypeptide
  XENP022903 [ICOS]_H0.35_L0.38 one-arm mAb Fab-Fc Heavy Chain
QVQLVQSGAEVKKPGASVKVSCKASGYTFTGYYMHWVRQAPGQGLEWMGWINPHSGGTNYAQKFQGRVTMTRDTSISTAYMELSRLRSDDTAVYYCARTYYYDTSGYYHDAFDVWGQGTMVTVSSASTKGPSVFPLAPSSKSTSGGTAALGCLVKDYFPEPVTVSWNSGALTSGVHTFPAVLQSSGLYSLSSVVTVPSSSLGTQTYICNVNHKPSDTKVDKKVEPKSCDKTHTCPPCPAPPVAGPSVFLFPPKPKDTLMISRTPEVTCVVVDVKHEDPEVKFNWYVDGVEVHNAKTKPREEEYNSTYRVVSVLTVLHQDWLNGKEYKCKVSNKALPAPIEKTISKAKGQPREPQVYTLPPSREEMTKNQVSLTCDVSGFYPSDIAVEWESDGQPENNYKTTPPVLDSDGSFFLYSKLTVDKSRWEQGDVFSCSVMHEALHNHYTQKSLSLSPGK

SEQ ID NO: 28175 - protein, 231 aa, Artificial Sequence; identical to SEQ ID NO: 27198
  Description of Artificial Sequence: Synthetic polypeptide
  XENP022903 [ICOS]_H0.35_L0.38 one-arm mAb Fc-only Heavy Chain

SEQ ID NO: 28176 - protein, 214 aa, Artificial Sequence; identical to SEQ ID NO: 26557
  Description of Artificial Sequence: Synthetic polypeptide
  XENP022903 [ICOS]_H0.35_L0.38 one-arm mAb Light Chain

SEQ ID NO: 28177 - protein, 454 aa, Artificial Sequence; identical to SEQ ID NO: 28174
  Description of Artificial Sequence: Synthetic polypeptide
  XENP022904 [ICOS]_H0.35_L0.42 one-arm mAb Fab-Fc Heavy Chain

SEQ ID NO: 28178 - protein, 231 aa, Artificial Sequence; identical to SEQ ID NO: 27198
  Description of Artificial Sequence: Synthetic polypeptide
  XENP022904 [ICOS]_H0.35_L0.42 one-arm mAb Fc-only Heavy Chain

SEQ ID NO: 28179 - protein, 214 aa, Artificial Sequence; identical to SEQ ID NO: 28016
  Description of Artificial Sequence: Synthetic polypeptide
  XENP022904 [ICOS]_H0.35_L0.42 one-arm mAb Light Chain

SEQ ID NO: 28180 - protein, 454 aa, Artificial Sequence; identical to SEQ ID NO: 28174
  Description of Artificial Sequence: Synthetic polypeptide
  XENP022905 [ICOS]_H0.35_L0.43 one-arm mAb Fab-Fc Heavy Chain

SEQ ID NO: 28181 - protein, 231 aa, Artificial Sequence; identical to SEQ ID NO: 27198
  Description of Artificial Sequence: Synthetic polypeptide
  XENP022905 [ICOS]_H0.35_L0.43 one-arm mAb Fc-only Heavy Chain

SEQ ID NO: 28182 - protein, 214 aa, Artificial Sequence; identical to SEQ ID NO: 28018
  Description of Artificial Sequence: Synthetic polypeptide
  XENP022905 [ICOS]_H0.35_L0.43 one-arm mAb Light Chain

SEQ ID NO: 28183 - protein, 454 aa, Artificial Sequence; identical to SEQ ID NO: 28174
  Description of Artificial Sequence: Synthetic polypeptide
  XENP022906 [ICOS]_H0.35_L0.44 one-arm mAb Fab-Fc Heavy Chain

SEQ ID NO: 28184 - protein, 231 aa, Artificial Sequence; identical to SEQ ID NO: 27198
  Description of Artificial Sequence: Synthetic polypeptide
  XENP022906 [ICOS]_H0.35_L0.44 one-arm mAb Fc-only Heavy Chain

SEQ ID NO: 28185 - protein, 214 aa, Artificial Sequence; identical to SEQ ID NO: 28020
  Description of Artificial Sequence: Synthetic polypeptide
  XENP022906 [ICOS]_H0.35_L0.44 one-arm mAb Light Chain

SEQ ID NO: 28186 - protein, 454 aa, Artificial Sequence
  Description of Artificial Sequence: Synthetic polypeptide
  XENP022907 [ICOS]_H0.61_L0.38 one-arm mAb Fab-Fc Heavy Chain
QVQLVQSGAEVKKPGASVKVSCKASGYTFTGYYMHWVRQAPGQGLEWMGIINPHSGGTNYAQKFQGRVTMTRDTSISTAYMELSRLRSDDTAVYYCARTYYYDTSGYYHDAFDVWGQGTMVTVSSASTKGPSVFPLAPSSKSTSGGTAALGCLVKDYFPEPVTVSWNSGALTSGVHTFPAVLQSSGLYSLSSVVTVPSSSLGTQTYICNVNHKPSDTKVDKKVEPKSCDKTHTCPPCPAPPVAGPSVFLFPPKPKDTLMISRTPEVTCVVVDVKHEDPEVKFNWYVDGVEVHNAKTKPREEEYNSTYRVVSVLTVLHQDWLNGKEYKCKVSNKALPAPIEKTISKAKGQPREPQVYTLPPSREEMTKNQVSLTCDVSGFYPSDIAVEWESDGQPENNYKTTPPVLDSDGSFFLYSKLTVDKSRWEQGDVFSCSVMHEALHNHYTQKSLSLSPGK

SEQ ID NO: 28187 - protein, 231 aa, Artificial Sequence; identical to SEQ ID NO: 27198
  Description of Artificial Sequence: Synthetic polypeptide
  XENP022907 [ICOS]_H0.61_L0.38 one-arm mAb Fc-only Heavy Chain

SEQ ID NO: 28188 - protein, 214 aa, Artificial Sequence; identical to SEQ ID NO: 26557
  Description of Artificial Sequence: Synthetic polypeptide
  XENP022907 [ICOS]_H0.61_L0.38 one-arm mAb Light Chain

SEQ ID NO: 28189 - protein, 454 aa, Artificial Sequence; identical to SEQ ID NO: 28186
  Description of Artificial Sequence: Synthetic polypeptide
  XENP022908 [ICOS]_H0.61_L0.42 one-arm mAb Fab-Fc Heavy Chain

SEQ ID NO: 28190 - protein, 231 aa, Artificial Sequence; identical to SEQ ID NO: 27198
  Description of Artificial Sequence: Synthetic polypeptide
  XENP022908 [ICOS]_H0.61_L0.42 one-arm mAb Fc-only Heavy Chain

SEQ ID NO: 28191 - protein, 214 aa, Artificial Sequence; identical to SEQ ID NO: 28016
  Description of Artificial Sequence: Synthetic polypeptide
  XENP022908 [ICOS]_H0.61_L0.42 one-arm mAb Light Chain

SEQ ID NO: 28192 - protein, 454 aa, Artificial Sequence; identical to SEQ ID NO: 28186
  Description of Artificial Sequence: Synthetic polypeptide
  XENP022909 [ICOS]_H0.61_L0.43 one-arm mAb Fab-Fc Heavy Chain

SEQ ID NO: 28193 - protein, 231 aa, Artificial Sequence; identical to SEQ ID NO: 27198
  Description of Artificial Sequence: Synthetic polypeptide
  XENP022909 [ICOS]_H0.61_L0.43 one-arm mAb Fc-only Heavy Chain

SEQ ID NO: 28194 - protein, 214 aa, Artificial Sequence; identical to SEQ ID NO: 28018
  Description of Artificial Sequence: Synthetic polypeptide
  XENP022909 [ICOS]_H0.61_L0.43 one-arm mAb Light Chain

SEQ ID NO: 28195 - protein, 454 aa, Artificial Sequence; identical to SEQ ID NO: 28186
  Description of Artificial Sequence: Synthetic polypeptide
  XENP022910 [ICOS]_H0.61_L0.44 one-arm mAb Fab-Fc Heavy Chain

SEQ ID NO: 28196 - protein, 231 aa, Artificial Sequence; identical to SEQ ID NO: 27198
  Description of Artificial Sequence: Synthetic polypeptide
  XENP022910 [ICOS]_H0.61_L0.44 one-arm mAb Fc-only Heavy Chain

SEQ ID NO: 28197 - protein, 214 aa, Artificial Sequence; identical to SEQ ID NO: 28020
  Description of Artificial Sequence: Synthetic polypeptide
  XENP022910 [ICOS]_H0.61_L0.44 one-arm mAb Light Chain

SEQ ID NO: 28198 - protein, 454 aa, Artificial Sequence
  Description of Artificial Sequence: Synthetic polypeptide
  XENP022911 [ICOS]_H0.24_L0.38 one-arm mAb Fab-Fc Heavy Chain
QVQLVQSGAEVKKPGASVKVSCKASGYTFTGYYMHWVRQAPGQGLEWMGWINPHSGGTNYAQKFQGRVTMTRDTSISTAYMELSRLRSDDTAVYYCARTYYYDTSGYYHDAFDIWGQGTMVTVSSASTKGPSVFPLAPSSKSTSGGTAALGCLVKDYFPEPVTVSWNSGALTSGVHTFPAVLQSSGLYSLSSVVTVPSSSLGTQTYICNVNHKPSDTKVDKKVEPKSCDKTHTCPPCPAPPVAGPSVFLFPPKPKDTLMISRTPEVTCVVVDVKHEDPEVKFNWYVDGVEVHNAKTKPREEEYNSTYRVVSVLTVLHQDWLNGKEYKCKVSNKALPAPIEKTISKAKGQPREPQVYTLPPSREEMTKNQVSLTCDVSGFYPSDIAVEWESDGQPENNYKTTPPVLDSDGSFFLYSKLTVDKSRWEQGDVFSCSVMHEALHNHYTQKSLSLSPGK

SEQ ID NO: 28199 - protein, 231 aa, Artificial Sequence; identical to SEQ ID NO: 27198
  Description of Artificial Sequence: Synthetic polypeptide
  XENP022911 [ICOS]_H0.24_L0.38 one-arm mAb Fc-only Heavy Chain

SEQ ID NO: 28200 - protein, 214 aa, Artificial Sequence; identical to SEQ ID NO: 26557
  Description of Artificial Sequence: Synthetic polypeptide
  XENP022911 [ICOS]_H0.24_L0.38 one-arm mAb Light Chain

SEQ ID NO: 28201 - protein, 454 aa, Artificial Sequence
  Description of Artificial Sequence: Synthetic polypeptide
  XENP022912 [ICOS]_H0.37_L0.38 one-arm mAb Fab-Fc Heavy Chain
QVQLVQSGAEVKKPGASVKVSCKASGYTFTGYYMHWVRQAPGQGLEWMGWINPHSGGTNYAQKFQGRVTMTRDTSISTAYMELSSLRSEDTAVYYCARTYYYDTSGYYHDAFDVWGQGTMVTVSSASTKGPSVFPLAPSSKSTSGGTAALGCLVKDYFPEPVTVSWNSGALTSGVHTFPAVLQSSGLYSLSSVVTVPSSSLGTQTYICNVNHKPSDTKVDKKVEPKSCDKTHTCPPCPAPPVAGPSVFLFPPKPKDTLMISRTPEVTCVVVDVKHEDPEVKFNWYVDGVEVHNAKTKPREEEYNSTYRVVSVLTVLHQDWLNGKEYKCKVSNKALPAPIEKTISKAKGQPREPQVYTLPPSREEMTKNQVSLTCDVSGFYPSDIAVEWESDGQPENNYKTTPPVLDSDGSFFLYSKLTVDKSRWEQGDVFSCSVMHEALHNHYTQKSLSLSPGK

SEQ ID NO: 28202 - protein, 231 aa, Artificial Sequence; identical to SEQ ID NO: 27198
  Description of Artificial Sequence: Synthetic polypeptide
  XENP022912 [ICOS]_H0.37_L0.38 one-arm mAb Fc-only Heavy Chain

SEQ ID NO: 28203 - protein, 214 aa, Artificial Sequence; identical to SEQ ID NO: 26557
  Description of Artificial Sequence: Synthetic polypeptide
  XENP022912 [ICOS]_H0.37_L0.38 one-arm mAb Light Chain

SEQ ID NO: 28204 - protein, 454 aa, Artificial Sequence
  Description of Artificial Sequence: Synthetic polypeptide
  XENP022913 [ICOS]_H0.40_L0.38 one-arm mAb Fab-Fc Heavy Chain
QVQLVQSGAEVKKPGASVKVSCKASGYTFTGYYMHWVRQAPGQGLEWMGWINPHSGETNYAQKFQGRVTMTRDTSISTAYMELSSLRSEDTAVYYCARTYYYDTSGYYHDAFDVWGQGTMVTVSSASTKGPSVFPLAPSSKSTSGGTAALGCLVKDYFPEPVTVSWNSGALTSGVHTFPAVLQSSGLYSLSSVVTVPSSSLGTQTYICNVNHKPSDTKVDKKVEPKSCDKTHTCPPCPAPPVAGPSVFLFPPKPKDTLMISRTPEVTCVVVDVKHEDPEVKFNWYVDGVEVHNAKTKPREEEYNSTYRVVSVLTVLHQDWLNGKEYKCKVSNKALPAPIEKTISKAKGQPREPQVYTLPPSREEMTKNQVSLTCDVSGFYPSDIAVEWESDGQPENNYKTTPPVLDSDGSFFLYSKLTVDKSRWEQGDVFSCSVMHEALHNHYTQKSLSLSPGK

SEQ ID NO: 28205 - protein, 231 aa, Artificial Sequence; identical to SEQ ID NO: 27198
  Description of Artificial Sequence: Synthetic polypeptide
  XENP022913 [ICOS]_H0.40_L0.38 one-arm mAb Fc-only Heavy Chain

SEQ ID NO: 28206 - protein, 214 aa, Artificial Sequence; identical to SEQ ID NO: 26557
  Description of Artificial Sequence: Synthetic polypeptide
  XENP022913 [ICOS]_H0.40_L0.38 one-arm mAb Light Chain

SEQ ID NO: 28207 - protein, 454 aa, Artificial Sequence
  Description of Artificial Sequence: Synthetic polypeptide
  XENP022914 [ICOS]_H0.44_L0.38 one-arm mAb Fab-Fc Heavy Chain
QVQLVQSGAEVKKPGASVKVSCKASGYTFTGYYMHWVRQAPGQGLEWMGWINPHSGGTNYAQKFQGRVTITADESTSTAYMELSRLRSDDTAVYYCARTYYYDTSGYYHDAFDVWGQGTMVTVSSASTKGPSVFPLAPSSKSTSGGTAALGCLVKDYFPEPVTVSWNSGALTSGVHTFPAVLQSSGLYSLSSVVTVPSSSLGTQTYICNVNHKPSDTKVDKKVEPKSCDKTHTCPPCPAPPVAGPSVFLFPPKPKDTLMISRTPEVTCVVVDVKHEDPEVKFNWYVDGVEVHNAKTKPREEEYNSTYRVVSVLTVLHQDWLNGKEYKCKVSNKALPAPIEKTISKAKGQPREPQVYTLPPSREEMTKNQVSLTCDVSGFYPSDIAVEWESDGQPENNYKTTPPVLDSDGSFFLYSKLTVDKSRWEQGDVFSCSVMHEALHNHYTQKSLSLSPGK

SEQ ID NO: 28208 - protein, 231 aa, Artificial Sequence; identical to SEQ ID NO: 27198
  Description of Artificial Sequence: Synthetic polypeptide
  XENP022914 [ICOS]_H0.44_L0.38 one-arm mAb Fc-only Heavy Chain

SEQ ID NO: 28209 - protein, 214 aa, Artificial Sequence; identical to SEQ ID NO: 26557
  Description of Artificial Sequence: Synthetic polypeptide
  XENP022914 [ICOS]_H0.44_L0.38 one-arm mAb Light Chain

SEQ ID NO: 28210 - protein, 454 aa, Artificial Sequence
  Description of Artificial Sequence: Synthetic polypeptide
  XENP022915 [ICOS]_H0.56_L0.38 one-arm mAb Fab-Fc Heavy Chain
QVQLVQSGAEVKKPGASVKVSCKASGYTFTGYYMHWVRQAPGQGLEWMGIINPHSGGTNYAQKFQGRVTMTRDTSISTAYMELSRLRSDDTAVYYCARTYYYDTSGYYHDAFDIWGQGTMVTVSSASTKGPSVFPLAPSSKSTSGGTAALGCLVKDYFPEPVTVSWNSGALTSGVHTFPAVLQSSGLYSLSSVVTVPSSSLGTQTYICNVNHKPSDTKVDKKVEPKSCDKTHTCPPCPAPPVAGPSVFLFPPKPKDTLMISRTPEVTCVVVDVKHEDPEVKFNWYVDGVEVHNAKTKPREEEYNSTYRVVSVLTVLHQDWLNGKEYKCKVSNKALPAPIEKTISKAKGQPREPQVYTLPPSREEMTKNQVSLTCDVSGFYPSDIAVEWESDGQPENNYKTTPPVLDSDGSFFLYSKLTVDKSRWEQGDVFSCSVMHEALHNHYTQKSLSLSPGK

SEQ ID NO: 28211 - protein, 231 aa, Artificial Sequence; identical to SEQ ID NO: 27198
  Description of Artificial Sequence: Synthetic polypeptide
  XENP022915 [ICOS]_H0.56_L0.38 one-arm mAb Fc-only Heavy Chain

SEQ ID NO: 28212 - protein, 214 aa, Artificial Sequence; identical to SEQ ID NO: 26557
  Description of Artificial Sequence: Synthetic polypeptide
  XENP022915 [ICOS]_H0.56_L0.38 one-arm mAb Light Chain

SEQ ID NO: 28213 - protein, 454 aa, Artificial Sequence
  Description of Artificial Sequence: Synthetic polypeptide
  XENP022916 [ICOS]_H0.62_L0.38 one-arm mAb Fab-Fc Heavy Chain
QVQLVQSGAEVKKPGASVKVSCKASGYTFTGYYMHWVRQAPGQGLEWMGWINPHSGGTNYAQKFQGRVTMTEDTSTDTAYMELSRLRSDDTAVYYCARTYYYDTSGYYHDAFDVWGQGTMVTVSSASTKGPSVFPLAPSSKSTSGGTAALGCLVKDYFPEPVTVSWNSGALTSGVHTFPAVLQSSGLYSLSSVVTVPSSSLGTQTYICNVNHKPSDTKVDKKVEPKSCDKTHTCPPCPAPPVAGPSVFLFPPKPKDTLMISRTPEVTCVVVDVKHEDPEVKFNWYVDGVEVHNAKTKPREEEYNSTYRVVSVLTVLHQDWLNGKEYKCKVSNKALPAPIEKTISKAKGQPREPQVYTLPPSREEMTKNQVSLTCDVSGFYPSDIAVEWESDGQPENNYKTTPPVLDSDGSFFLYSKLTVDKSRWEQGDVFSCSVMHEALHNHYTQKSLSLSPGK

SEQ ID NO: 28214 - protein, 231 aa, Artificial Sequence; identical to SEQ ID NO: 27198
  Description of Artificial Sequence: Synthetic polypeptide
  XENP022916 [ICOS]_H0.62_L0.38 one-arm mAb Fc-only Heavy Chain

SEQ ID NO: 28215 - protein, 214 aa, Artificial Sequence; identical to SEQ ID NO: 26557
  Description of Artificial Sequence: Synthetic polypeptide
  XENP022916 [ICOS]_H0.62_L0.38 one-arm mAb Light Chain

SEQ ID NO: 28216 - protein, 454 aa, Artificial Sequence; identical to SEQ ID NO: 28174
  Description of Artificial Sequence: Synthetic polypeptide
  XENP022933 [ICOS]_H0.35_L0.36 one-arm mAb Fab-Fc Heavy Chain

SEQ ID NO: 28217 - protein, 231 aa, Artificial Sequence; identical to SEQ ID NO: 27198
  Description of Artificial Sequence: Synthetic polypeptide
  XENP022933 [ICOS]_H0.35_L0.36 one-arm mAb Fc-only Heavy Chain

SEQ ID NO: 28218 - protein, 214 aa, Artificial Sequence; identical to SEQ ID NO: 26517
  Description of Artificial Sequence: Synthetic polypeptide
  XENP022933 [ICOS]_H0.35_L0.36 one-arm mAb Light Chain

SEQ ID NO: 28219 - protein, 454 aa, Artificial Sequence; identical to SEQ ID NO: 28186
  Description of Artificial Sequence: Synthetic polypeptide
  XENP022934 [ICOS]_H0.61_L0.36 one-arm mAb Fab-Fc Heavy Chain

SEQ ID NO: 28220 - protein, 231 aa, Artificial Sequence; identical to SEQ ID NO: 27198
  Description of Artificial Sequence: Synthetic polypeptide
  XENP022934 [ICOS]_H0.61_L0.36 one-arm mAb Fc-only Heavy Chain

SEQ ID NO: 28221 - protein, 214 aa, Artificial Sequence; identical to SEQ ID NO: 26517
  Description of Artificial Sequence: Synthetic polypeptide
  XENP022934 [ICOS]_H0.61_L0.36 one-arm mAb Light Chain

SEQ ID NO: 28222 - protein, 454 aa, Artificial Sequence; identical to SEQ ID NO: 28198
  Description of Artificial Sequence: Synthetic polypeptide
  XENP022962 [ICOS]_H0.24_L0.37 one-arm mAb Fab-Fc Heavy Chain

SEQ ID NO: 28223 - protein, 231 aa, Artificial Sequence; identical to SEQ ID NO: 27198
  Description of Artificial Sequence: Synthetic polypeptide
  XENP022962 [ICOS]_H0.24_L0.37 one-arm mAb Fc-only Heavy Chain

SEQ ID NO: 28224 - protein, 214 aa, Artificial Sequence; identical to SEQ ID NO: 26537
  Description of Artificial Sequence: Synthetic polypeptide
  XENP022962 [ICOS]_H0.24_L0.37 one-arm mAb Light Chain

SEQ ID NO: 28225 - protein, 454 aa, Artificial Sequence; identical to SEQ ID NO: 28201
  Description of Artificial Sequence: Synthetic polypeptide
  XENP022963 [ICOS]_H0.37_L0.37 one-arm mAb Fab-Fc Heavy Chain

SEQ ID NO: 28226 - protein, 231 aa, Artificial Sequence; identical to SEQ ID NO: 27198
  Description of Artificial Sequence: Synthetic polypeptide
  XENP022963 [ICOS]_H0.37_L0.37 one-arm mAb Fc-only Heavy Chain

SEQ ID NO: 28227 - protein, 214 aa, Artificial Sequence; identical to SEQ ID NO: 26537
  Description of Artificial Sequence: Synthetic polypeptide
  XENP022963 [ICOS]_H0.37_L0.37 one-arm mAb Light Chain

SEQ ID NO: 28228 - protein, 454 aa, Artificial Sequence; identical to SEQ ID NO: 28204
  Description of Artificial Sequence: Synthetic polypeptide
  XENP022964 [ICOS]_H0.40_L0.37 one-arm mAb Fab-Fc Heavy Chain

SEQ ID NO: 28229 - protein, 231 aa, Artificial Sequence; identical to SEQ ID NO: 27198
  Description of Artificial Sequence: Synthetic polypeptide
  XENP022964 [ICOS]_H0.40_L0.37 one-arm mAb Fc-only Heavy Chain

SEQ ID NO: 28230 - protein, 214 aa, Artificial Sequence; identical to SEQ ID NO: 26537
  Description of Artificial Sequence: Synthetic polypeptide
  XENP022964 [ICOS]_H0.40_L0.37 one-arm mAb Light Chain

SEQ ID NO: 28231 - protein, 454 aa, Artificial Sequence; identical to SEQ ID NO: 28207
  Description of Artificial Sequence: Synthetic polypeptide
  XENP022965 [ICOS]_H0.44_L0.37 one-arm mAb Fab-Fc Heavy Chain

SEQ ID NO: 28232 - protein, 231 aa, Artificial Sequence; identical to SEQ ID NO: 27198
  Description of Artificial Sequence: Synthetic polypeptide
  XENP022965 [ICOS]_H0.44_L0.37 one-arm mAb Fc-only Heavy Chain

SEQ ID NO: 28233 - protein, 214 aa, Artificial Sequence; identical to SEQ ID NO: 26537
  Description of Artificial Sequence: Synthetic polypeptide
  XENP022965 [ICOS]_H0.44_L0.37 one-arm mAb Light Chain

SEQ ID NO: 28234 - protein, 454 aa, Artificial Sequence; identical to SEQ ID NO: 28210
  Description of Artificial Sequence: Synthetic polypeptide
  XENP022966 [ICOS]_H0.56_L0.37 one-arm mAb Fab-Fc Heavy Chain

SEQ ID NO: 28235 - protein, 231 aa, Artificial Sequence; identical to SEQ ID NO: 27198
  Description of Artificial Sequence: Synthetic polypeptide
  XENP022966 [ICOS]_H0.56_L0.37 one-arm mAb Fc-only Heavy Chain

SEQ ID NO: 28236 - protein, 214 aa, Artificial Sequence; identical to SEQ ID NO: 26537
  Description of Artificial Sequence: Synthetic polypeptide
  XENP022966 [ICOS]_H0.56_L0.37 one-arm mAb Light Chain

SEQ ID NO: 28237 - protein, 454 aa, Artificial Sequence; identical to SEQ ID NO: 28213
  Description of Artificial Sequence: Synthetic polypeptide
  XENP022967 [ICOS]_H0.62_L0.37 one-arm mAb Fab-Fc Heavy Chain

SEQ ID NO: 28238 - protein, 231 aa, Artificial Sequence; identical to SEQ ID NO: 27198
  Description of Artificial Sequence: Synthetic polypeptide
  XENP022967 [ICOS]_H0.62_L0.37 one-arm mAb Fc-only Heavy Chain

SEQ ID NO: 28239 - protein, 214 aa, Artificial Sequence; identical to SEQ ID NO: 26537
  Description of Artificial Sequence: Synthetic polypeptide
  XENP022967 [ICOS]_H0.62_L0.37 one-arm mAb Light Chain

SEQ ID NO: 28240 - protein, 454 aa, Artificial Sequence; identical to SEQ ID NO: 28174
  Description of Artificial Sequence: Synthetic polypeptide
  XENP022968 [ICOS]_H0.35_L0.34 one-arm mAb Fab-Fc Heavy Chain

SEQ ID NO: 28241 - protein, 231 aa, Artificial Sequence; identical to SEQ ID NO: 27198
  Description of Artificial Sequence: Synthetic polypeptide
  XENP022968 [ICOS]_H0.35_L0.34 one-arm mAb Fc-only Heavy Chain

SEQ ID NO: 28242 - protein, 214 aa, Artificial Sequence; identical to SEQ ID NO: 26497
  Description of Artificial Sequence: Synthetic polypeptide
  XENP022968 [ICOS]_H0.35_L0.34 one-arm mAb Light Chain

SEQ ID NO: 28243 - protein, 454 aa, Artificial Sequence; identical to SEQ ID NO: 28174
  Description of Artificial Sequence: Synthetic polypeptide
  XENP022969 [ICOS]_H0.35_L0.35 one-arm mAb Fab-Fc Heavy Chain

SEQ ID NO: 28244 - protein, 231 aa, Artificial Sequence; identical to SEQ ID NO: 27198
  Description of Artificial Sequence: Synthetic polypeptide
  XENP022969 [ICOS]_H0.35_L0.35 one-arm mAb Fc-only Heavy Chain

SEQ ID NO: 28245 - protein, 214 aa, Artificial Sequence; identical to SEQ ID NO: 28008
  Description of Artificial Sequence: Synthetic polypeptide
  XENP022969 [ICOS]_H0.35_L0.35 one-arm mAb Light Chain

SEQ ID NO: 28246 - protein, 454 aa, Artificial Sequence; identical to SEQ ID NO: 28174
  Description of Artificial Sequence: Synthetic polypeptide
  XENP022970 [ICOS]_H0.35_L0.37 one-arm mAb Fab-Fc Heavy Chain

SEQ ID NO: 28247 - protein, 231 aa, Artificial Sequence; identical to SEQ ID NO: 27198
  Description of Artificial Sequence: Synthetic polypeptide
  XENP022970 [ICOS]_H0.35_L0.37 one-arm mAb Fc-only Heavy Chain

SEQ ID NO: 28248 - protein, 214 aa, Artificial Sequence; identical to SEQ ID NO: 26537
  Description of Artificial Sequence: Synthetic polypeptide
  XENP022970 [ICOS]_H0.35_L0.37 one-arm mAb Light Chain

SEQ ID NO: 28249 - protein, 454 aa, Artificial Sequence; identical to SEQ ID NO: 28186
  Description of Artificial Sequence: Synthetic polypeptide
  XENP022971 [ICOS]_H0.61_L0.34 one-arm mAb Fab-Fc Heavy Chain

SEQ ID NO: 28250 - protein, 231 aa, Artificial Sequence; identical to SEQ ID NO: 27198
  Description of Artificial Sequence: Synthetic polypeptide
  XENP022971 [ICOS]_H0.61_L0.34 one-arm mAb Fc-only Heavy Chain

SEQ ID NO: 28251 - protein, 214 aa, Artificial Sequence; identical to SEQ ID NO: 26497
  Description of Artificial Sequence: Synthetic polypeptide
  XENP022971 [ICOS]_H0.61_L0.34 one-arm mAb Light Chain

SEQ ID NO: 28252 - protein, 454 aa, Artificial Sequence; identical to SEQ ID NO: 28186
  Description of Artificial Sequence: Synthetic polypeptide
  XENP022972 [ICOS]_H0.61_L0.35 one-arm mAb Fab-Fc Heavy Chain

SEQ ID NO: 28253 - protein, 231 aa, Artificial Sequence; identical to SEQ ID NO: 27198
  Description of Artificial Sequence: Synthetic polypeptide
  XENP022972 [ICOS]_H0.61_L0.35 one-arm mAb Fc-only Heavy Chain

SEQ ID NO: 28254 - protein, 214 aa, Artificial Sequence; identical to SEQ ID NO: 28008
  Description of Artificial Sequence: Synthetic polypeptide
  XENP022972 [ICOS]_H0.61_L0.35 one-arm mAb Light Chain

SEQ ID NO: 28255 - protein, 454 aa, Artificial Sequence; identical to SEQ ID NO: 28186
  Description of Artificial Sequence: Synthetic polypeptide
  XENP022973 [ICOS]_H0.61_L0.37 one-arm mAb Fab-Fc Heavy Chain

SEQ ID NO: 28256 - protein, 231 aa, Artificial Sequence; identical to SEQ ID NO: 27198
  Description of Artificial Sequence: Synthetic polypeptide
  XENP022973 [ICOS]_H0.61_L0.37 one-arm mAb Fc-only Heavy Chain

SEQ ID NO: 28257 - protein, 214 aa, Artificial Sequence; identical to SEQ ID NO: 26537
  Description of Artificial Sequence: Synthetic polypeptide
  XENP022973 [ICOS]_H0.61_L0.37 one-arm mAb Light Chain

SEQ ID NO: 28258 - protein, 454 aa, Artificial Sequence; identical to SEQ ID NO: 28201
  Description of Artificial Sequence: Synthetic polypeptide
  XENP023094 [ICOS]_H0.37_L0 one-arm mAb Fab-Fc Heavy Chain

SEQ ID NO: 28259 - protein, 231 aa, Artificial Sequence; identical to SEQ ID NO: 27198
  Description of Artificial Sequence: Synthetic polypeptide
  XENP023094 [ICOS]_H0.37_L0 one-arm mAb Fc-only Heavy Chain

SEQ ID NO: 28260 - protein, 214 aa, Artificial Sequence; identical to SEQ ID NO: 26297
  Description of Artificial Sequence: Synthetic polypeptide
  XENP023094 [ICOS]_H0.37_L0 one-arm mAb Light Chain

SEQ ID NO: 28261 - protein, 454 aa, Artificial Sequence
  Description of Artificial Sequence: Synthetic polypeptide
  XENP023095 [ICOS]_H0.64_L0 one-arm mAb Fab-Fc Heavy Chain
QVQLVQSGAEVKKPGASVKVSCKASGYTFTGYYMHWVRQAPGQGLEWMGWINPHSGGTNYAQKFQGRVTMTEDTSTDTAYMELSSLRSEDTAVYYCARTYYYDTSGYYHDAFDVWGQGTMVTVSSASTKGPSVFPLAPSSKSTSGGTAALGCLVKDYFPEPVTVSWNSGALTSGVHTFPAVLQSSGLYSLSSVVTVPSSSLGTQTYICNVNHKPSDTKVDKKVEPKSCDKTHTCPPCPAPPVAGPSVFLFPPKPKDTLMISRTPEVTCVVVDVKHEDPEVKFNWYVDGVEVHNAKTKPREEEYNSTYRVVSVLTVLHQDWLNGKEYKCKVSNKALPAPIEKTISKAKGQPREPQVYTLPPSREEMTKNQVSLTCDVSGFYPSDIAVEWESDGQPENNYKTTPPVLDSDGSFFLYSKLTVDKSRWEQGDVFSCSVMHEALHNHYTQKSLSLSPGK

SEQ ID NO: 28262 - protein, 231 aa, Artificial Sequence; identical to SEQ ID NO: 27198
  Description of Artificial Sequence: Synthetic polypeptide
  XENP023095 [ICOS]_H0.64_L0 one-arm mAb Fc-only Heavy Chain

SEQ ID NO: 28263 - protein, 214 aa, Artificial Sequence; identical to SEQ ID NO: 26297
  Description of Artificial Sequence: Synthetic polypeptide
  XENP023095 [ICOS]_H0.64_L0 one-arm mAb Light Chain

SEQ ID NO: 28264 - protein, 454 aa, Artificial Sequence; identical to SEQ ID NO: 26562
  Description of Artificial Sequence: Synthetic polypeptide
  XENP023096 [ICOS]_H0.66_L0 one-arm mAb Fab-Fc Heavy Chain

SEQ ID NO: 28265 - protein, 231 aa, Artificial Sequence; identical to SEQ ID NO: 27198
  Description of Artificial Sequence: Synthetic polypeptide
  XENP023096 [ICOS]_H0.66_L0 one-arm mAb Fc-only Heavy Chain

SEQ ID NO: 28266 - protein, 214 aa, Artificial Sequence; identical to SEQ ID NO: 26297
  Description of Artificial Sequence: Synthetic polypeptide
  XENP023096 [ICOS]_H0.66_L0 one-arm mAb Light Chain

SEQ ID NO: 28267 - protein, 454 aa, Artificial Sequence
  Description of Artificial Sequence: Synthetic polypeptide
  XENP023101 [ICOS]_H0.67_L0 one-arm mAb Fab-Fc Heavy Chain
QVQLVQSGAEVKKPGASVKVSCKASGYTFTGYYMHWVRQAPGQGLEWMGWINPHSGETIYAQKFQGRVTMTEDTSTDTAYMELSSLRSEDTAVYYCARTYYYDTSGYYHDAFDVWGQGTMVTVSSASTKGPSVFPLAPSSKSTSGGTAALGCLVKDYFPEPVTVSWNSGALTSGVHTFPAVLQSSGLYSLSSVVTVPSSSLGTQTYICNVNHKPSDTKVDKKVEPKSCDKTHTCPPCPAPPVAGPSVFLFPPKPKDTLMISRTPEVTCVVVDVKHEDPEVKFNWYVDGVEVHNAKTKPREEEYNSTYRVVSVLTVLHQDWLNGKEYKCKVSNKALPAPIEKTISKAKGQPREPQVYTLPPSREEMTKNQVSLTCDVSGFYPSDIAVEWESDGQPENNYKTTPPVLDSDGSFFLYSKLTVDKSRWEQGDVFSCSVMHEALHNHYTQKSLSLSPGK

SEQ ID NO: 28268 - protein, 231 aa, Artificial Sequence; identical to SEQ ID NO: 27198
  Description of Artificial Sequence: Synthetic polypeptide
  XENP023101 [ICOS]_H0.67_L0 one-arm mAb Fc-only Heavy Chain

SEQ ID NO: 28269 - protein, 214 aa, Artificial Sequence; identical to SEQ ID NO: 26297
  Description of Artificial Sequence: Synthetic polypeptide
  XENP023101 [ICOS]_H0.67_L0 one-arm mAb Light Chain

SEQ ID NO: 28270 - protein, 454 aa, Artificial Sequence; identical to SEQ ID NO: 26442
  Description of Artificial Sequence: Synthetic polypeptide
  XENP020896 [ICOS]_H0L0 _Fab-1G6_L1.194_H1.279 Fab-Fc Heavy Chain

SEQ ID NO: 28271 - protein, 480 aa, Artificial Sequence; identical to SEQ ID NO: 2870
  Description of Artificial Sequence: Synthetic polypeptide
  XENP020896 [ICOS]_H0L0 _Fab-1G6_L1.194_H1.279 scFv-Fc Heavy Chain

SEQ ID NO: 28272 - protein, 214 aa, Artificial Sequence; identical to SEQ ID NO: 26297
  Description of Artificial Sequence: Synthetic polypeptide
  XENP020896 [ICOS]_H0L0_Fab-1G6_L1.194_H1.279 Light Chain

SEQ ID NO: 28273 - protein, 454 aa, Artificial Sequence; identical to SEQ ID NO: 26442
  Description of Artificial Sequence: Synthetic polypeptide
  XENP022432 [ICOS]_H0_L0.5_Fab-1G6_L1.194_H1.279 Fab-Fc Heavy Chain

SEQ ID NO: 28274 - protein, 480 aa, Artificial Sequence; identical to SEQ ID NO: 2870
  Description of Artificial Sequence: Synthetic polypeptide
  XENP022432 [ICOS]_H0_L0.5_Fab-1G6_L1.194_H1.279 scFv-Fc Heavy Chain

SEQ ID NO: 28275 - protein, 214 aa, Artificial Sequence; identical to SEQ ID NO: 27243
  Description of Artificial Sequence: Synthetic polypeptide
  XENP022432 [ICOS]_H0_L0.5_Fab-1G6_L1.194_H1.279 Light Chain

SEQ ID NO: 28276 - protein, 454 aa, Artificial Sequence; identical to SEQ ID NO: 26442
  Description of Artificial Sequence: Synthetic polypeptide
  XENP022433 [ICOS]_H0_L0.7_Fab-1G6_L1.194_H1.279 Fab-Fc Heavy Chain

SEQ ID NO: 28277 - protein, 480 aa, Artificial Sequence; identical to SEQ ID NO: 2870
  Description of Artificial Sequence: Synthetic polypeptide
  XENP022433 [ICOS]_H0_L0.7_Fab-1G6_L1.194_H1.279 scFv-Fc Heavy Chain

SEQ ID NO: 28278 - protein, 214 aa, Artificial Sequence; identical to SEQ ID NO: 26477
  Description of Artificial Sequence: Synthetic polypeptide
  XENP022433 [ICOS]_H0_L0.7_Fab-1G6_L1.194_H1.279 Light Chain

SEQ ID NO: 28279 - protein, 454 aa, Artificial Sequence; identical to SEQ ID NO: 26442
  Description of Artificial Sequence: Synthetic polypeptide
  XENP022434 [ICOS]_H0_L0.9_Fab-1G6_L1.194_H1.279 Fab-Fc Heavy Chain

SEQ ID NO: 28280 - protein, 480 aa, Artificial Sequence; identical to SEQ ID NO: 2870
  Description of Artificial Sequence: Synthetic polypeptide
  XENP022434 [ICOS]_H0_L0.9_Fab-1G6_L1.194_H1.279 scFv-Fc Heavy Chain

SEQ ID NO: 28281 - protein, 214 aa, Artificial Sequence; identical to SEQ ID NO: 27265
  Description of Artificial Sequence: Synthetic polypeptide
  XENP022434 [ICOS]_H0_L0.9_Fab-1G6_L1.194_H1.279 Light Chain

SEQ ID NO: 28282 - protein, 454 aa, Artificial Sequence; identical to SEQ ID NO: 26442
  Description of Artificial Sequence: Synthetic polypeptide
  XENP022435 [ICOS]_H0_L0.10_Fab-1G6_L1.194_H1.279 Fab-Fc Heavy Chain

SEQ ID NO: 28283 - protein, 480 aa, Artificial Sequence; identical to SEQ ID NO: 2870
  Description of Artificial Sequence: Synthetic polypeptide
  XENP022435 [ICOS]_H0_L0.10_Fab-1G6_L1.194_H1.279 scFv-Fc Heavy Chain

SEQ ID NO: 28284 - protein, 214 aa, Artificial Sequence; identical to SEQ ID NO: 27276
  Description of Artificial Sequence: Synthetic polypeptide
  XENP022435 [ICOS]_H0_L0.10_Fab-1G6_L1.194_H1.279 Light Chain

SEQ ID NO: 28285 - protein, 454 aa, Artificial Sequence; identical to SEQ ID NO: 26442
  Description of Artificial Sequence: Synthetic polypeptide
  XENP022436 [ICOS]_H0_L0.14_Fab-1G6_L1.194_H1.279 Fab-Fc Heavy Chain

SEQ ID NO: 28286 - protein, 480 aa, Artificial Sequence; identical to SEQ ID NO: 2870
  Description of Artificial Sequence: Synthetic polypeptide
  XENP022436 [ICOS]_H0_L0.14_Fab-1G6_L1.194_H1.279 scFv-Fc Heavy Chain

SEQ ID NO: 28287 - protein, 214 aa, Artificial Sequence; identical to SEQ ID NO: 27287
  Description of Artificial Sequence: Synthetic polypeptide
  XENP022436 [ICOS]_H0_L0.14_Fab-1G6_L1.194_H1.279 Light Chain

SEQ ID NO: 28288 - protein, 454 aa, Artificial Sequence; identical to SEQ ID NO: 26442
  Description of Artificial Sequence: Synthetic polypeptide
  XENP022437 [ICOS]_H0_L0.15_Fab-1G6_L1.194_H1.279 Fab-Fc Heavy Chain

SEQ ID NO: 28289 - protein, 480 aa, Artificial Sequence; identical to SEQ ID NO: 2870
  Description of Artificial Sequence: Synthetic polypeptide
  XENP022437 [ICOS]_H0_L0.15_Fab-1G6_L1.194_H1.279 scFv-Fc Heavy Chain

SEQ ID NO: 28290 - protein, 214 aa, Artificial Sequence; identical to SEQ ID NO: 27298
  Description of Artificial Sequence: Synthetic polypeptide
  XENP022437 [ICOS]_H0_L0.15_Fab-1G6_L1.194_H1.279 Light Chain

SEQ ID NO: 28291 - protein, 454 aa, Artificial Sequence; identical to SEQ ID NO: 26442
  Description of Artificial Sequence: Synthetic polypeptide
  XENP022438 [ICOS]_H0_L0.20_Fab-1G6_L1.194_H1.279 Fab-Fc Heavy Chain

SEQ ID NO: 28292 - protein, 480 aa, Artificial Sequence; identical to SEQ ID NO: 2870
  Description of Artificial Sequence: Synthetic polypeptide
  XENP022438 [ICOS]_H0_L0.20_Fab-1G6_L1.194_H1.279 scFv-Fc Heavy Chain

SEQ ID NO: 28293 - protein, 214 aa, Artificial Sequence; identical to SEQ ID NO: 27309
  Description of Artificial Sequence: Synthetic polypeptide
  XENP022438 [ICOS]_H0_L0.20_Fab-1G6_L1.194_H1.279 Light Chain

SEQ ID NO: 28294 - protein, 454 aa, Artificial Sequence; identical to SEQ ID NO: 26442
  Description of Artificial Sequence: Synthetic polypeptide
  XENP022731 [ICOS]_H0_L0.21_Fab-1G6_L1.194_H1.279 Fab-Fc Heavy Chain

SEQ ID NO: 28295 - protein, 480 aa, Artificial Sequence; identical to SEQ ID NO: 2870
  Description of Artificial Sequence: Synthetic polypeptide
  XENP022731 [ICOS]_H0_L0.21_Fab-1G6_L1.194_H1.279 scFv-Fc Heavy Chain

SEQ ID NO: 28296 - protein, 214 aa, Artificial Sequence; identical to SEQ ID NO: 27980
  Description of Artificial Sequence: Synthetic polypeptide
  XENP022731 [ICOS]_H0_L0.21_Fab-1G6_L1.194_H1.279 Light Chain

SEQ ID NO: 28297 - protein, 454 aa, Artificial Sequence; identical to SEQ ID NO: 26442
  Description of Artificial Sequence: Synthetic polypeptide
  XENP022732 [ICOS]_H0_L0.22_Fab-1G6_L1.194_H1.279 Fab-Fc Heavy Chain

SEQ ID NO: 28298 - protein, 480 aa, Artificial Sequence; identical to SEQ ID NO: 2870
  Description of Artificial Sequence: Synthetic polypeptide
  XENP022732 [ICOS]_H0_L0.22_Fab-1G6_L1.194_H1.279 scFv-Fc Heavy Chain

SEQ ID NO: 28299 - protein, 214 aa, Artificial Sequence; identical to SEQ ID NO: 27982
  Description of Artificial Sequence: Synthetic polypeptide
  XENP022732 [ICOS]_H0_L0.22_Fab-1G6_L1.194_H1.279 Light Chain

SEQ ID NO: 28300 - protein, 454 aa, Artificial Sequence; identical to SEQ ID NO: 26442
  Description of Artificial Sequence: Synthetic polypeptide
  XENP022733 [ICOS]_H0_L0.23_Fab-1G6_L1.194_H1.279 Fab-Fc Heavy Chain

SEQ ID NO: 28301 - protein, 480 aa, Artificial Sequence; identical to SEQ ID NO: 2870
  Description of Artificial Sequence: Synthetic polypeptide
  XENP022733 [ICOS]_H0_L0.23_Fab-1G6_L1.194_H1.279 scFv-Fc Heavy Chain

SEQ ID NO: 28302 - protein, 214 aa, Artificial Sequence; identical to SEQ ID NO: 27984
  Description of Artificial Sequence: Synthetic polypeptide
  XENP022733 [ICOS]_H0_L0.23_Fab-1G6_L1.194_H1.279 Light Chain

SEQ ID NO: 28303 - protein, 454 aa, Artificial Sequence; identical to SEQ ID NO: 26442
  Description of Artificial Sequence: Synthetic polypeptide
  XENP022734 [ICOS]_H0_L0.24_Fab-1G6_L1.194_H1.279 Fab-Fc Heavy Chain

SEQ ID NO: 28304 - protein, 480 aa, Artificial Sequence; identical to SEQ ID NO: 2870
  Description of Artificial Sequence: Synthetic polypeptide
  XENP022734 [ICOS]_H0_L0.24_Fab-1G6_L1.194_H1.279 scFv-Fc Heavy Chain

SEQ ID NO: 28305 - protein, 214 aa, Artificial Sequence; identical to SEQ ID NO: 27986
  Description of Artificial Sequence: Synthetic polypeptide
  XENP022734 [ICOS]_H0_L0.24_Fab-1G6_L1.194_H1.279 Light Chain

SEQ ID NO: 28306 - protein, 454 aa, Artificial Sequence; identical to SEQ ID NO: 26442
  Description of Artificial Sequence: Synthetic polypeptide
  XENP022735 [ICOS]_H0_L0.25_Fab-1G6_L1.194_H1.279 Fab-Fc Heavy Chain

SEQ ID NO: 28307 - protein, 480 aa, Artificial Sequence; identical to SEQ ID NO: 2870
  Description of Artificial Sequence: Synthetic polypeptide
  XENP022735 [ICOS]_H0_L0.25_Fab-1G6_L1.194_H1.279 scFv-Fc Heavy Chain

SEQ ID NO: 28308 - protein, 214 aa, Artificial Sequence; identical to SEQ ID NO: 27988
  Description of Artificial Sequence: Synthetic polypeptide
  XENP022735 [ICOS]_H0_L0.25_Fab-1G6_L1.194_H1.279 Light Chain

SEQ ID NO: 28309 - protein, 454 aa, Artificial Sequence; identical to SEQ ID NO: 26442
  Description of Artificial Sequence: Synthetic polypeptide
  XENP022736 [ICOS]_H0_L0.26_Fab-1G6_L1.194_H1.279 Fab-Fc Heavy Chain

SEQ ID NO: 28310 - protein, 480 aa, Artificial Sequence; identical to SEQ ID NO: 2870
  Description of Artificial Sequence: Synthetic polypeptide
  XENP022736 [ICOS]_H0_L0.26_Fab-1G6_L1.194_H1.279 scFv-Fc Heavy Chain

SEQ ID NO: 28311 - protein, 214 aa, Artificial Sequence; identical to SEQ ID NO: 27990
  Description of Artificial Sequence: Synthetic polypeptide
  XENP022736 [ICOS]_H0_L0.26_Fab-1G6_L1.194_H1.279 Light Chain

SEQ ID NO: 28312 - protein, 454 aa, Artificial Sequence; identical to SEQ ID NO: 26442
  Description of Artificial Sequence: Synthetic polypeptide
  XENP022737 [ICOS]_H0_L0.27_Fab-1G6_L1.194_H1.279 Fab-Fc Heavy Chain

SEQ ID NO: 28313 - protein, 480 aa, Artificial Sequence; identical to SEQ ID NO: 2870
  Description of Artificial Sequence: Synthetic polypeptide
  XENP022737 [ICOS]_H0_L0.27_Fab-1G6_L1.194_H1.279 scFv-Fc Heavy Chain

SEQ ID NO: 28314 - protein, 214 aa, Artificial Sequence; identical to SEQ ID NO: 27992
  Description of Artificial Sequence: Synthetic polypeptide
  XENP022737 [ICOS]_H0_L0.27_Fab-1G6_L1.194_H1.279 Light Chain

SEQ ID NO: 28315 - protein, 454 aa, Artificial Sequence; identical to SEQ ID NO: 26442
  Description of Artificial Sequence: Synthetic polypeptide
  XENP022738 [ICOS]_H0_L0.28_Fab-1G6_L1.194_H1.279 Fab-Fc Heavy Chain

SEQ ID NO: 28316 - protein, 480 aa, Artificial Sequence; identical to SEQ ID NO: 2870
  Description of Artificial Sequence: Synthetic polypeptide
  XENP022738 [ICOS]_H0_L0.28_Fab-1G6_L1.194_H1.279 scFv-Fc Heavy Chain

SEQ ID NO: 28317 - protein, 214 aa, Artificial Sequence; identical to SEQ ID NO: 27994
  Description of Artificial Sequence: Synthetic polypeptide
  XENP022738 [ICOS]_H0_L0.28_Fab-1G6_L1.194_H1.279 Light Chain

SEQ ID NO: 28318 - protein, 454 aa, Artificial Sequence; identical to SEQ ID NO: 26442
  Description of Artificial Sequence: Synthetic polypeptide
  XENP022739 [ICOS]_H0_L0.29_Fab-1G6_L1.194_H1.279 Fab-Fc Heavy Chain

SEQ ID NO: 28319 - protein, 480 aa, Artificial Sequence; identical to SEQ ID NO: 2870
  Description of Artificial Sequence: Synthetic polypeptide
  XENP022739 [ICOS]_H0_L0.29_Fab-1G6_L1.194_H1.279 scFv-Fc Heavy Chain

SEQ ID NO: 28320 - protein, 214 aa, Artificial Sequence; identical to SEQ ID NO: 27996
  Description of Artificial Sequence: Synthetic polypeptide
  XENP022739 [ICOS]_H0_L0.29_Fab-1G6_L1.194_H1.279 Light Chain

SEQ ID NO: 28321 - protein, 454 aa, Artificial Sequence; identical to SEQ ID NO: 26442
  Description of Artificial Sequence: Synthetic polypeptide
  XENP022740 [ICOS]_H0_L0.30_Fab-1G6_L1.194_H1.279 Fab-Fc Heavy Chain

SEQ ID NO: 28322 - protein, 480 aa, Artificial Sequence; identical to SEQ ID NO: 2870
  Description of Artificial Sequence: Synthetic polypeptide
  XENP022740 [ICOS]_H0_L0.30_Fab-1G6_L1.194_H1.279 scFv-Fc Heavy Chain

SEQ ID NO: 28323 - protein, 214 aa, Artificial Sequence; identical to SEQ ID NO: 27998
  Description of Artificial Sequence: Synthetic polypeptide
  XENP022740 [ICOS]_H0_L0.30_Fab-1G6_L1.194_H1.279 Light Chain

SEQ ID NO: 28324 - protein, 454 aa, Artificial Sequence; identical to SEQ ID NO: 26442
  Description of Artificial Sequence: Synthetic polypeptide
  XENP022741 [ICOS]_H0_L0.31_Fab-1G6_L1.194_H1.279 Fab-Fc Heavy Chain

SEQ ID NO: 28325 - protein, 480 aa, Artificial Sequence; identical to SEQ ID NO: 2870
  Description of Artificial Sequence: Synthetic polypeptide
  XENP022741 [ICOS]_H0_L0.31_Fab-1G6_L1.194_H1.279 scFv-Fc Heavy Chain

SEQ ID NO: 28326 - protein, 214 aa, Artificial Sequence; identical to SEQ ID NO: 28000
  Description of Artificial Sequence: Synthetic polypeptide
  XENP022741 [ICOS]_H0_L0.31_Fab-1G6_L1.194_H1.279 Light Chain

SEQ ID NO: 28327 - protein, 454 aa, Artificial Sequence; identical to SEQ ID NO: 26442
  Description of Artificial Sequence: Synthetic polypeptide
  XENP022742 [ICOS]_H0_L0.32_Fab-1G6_L1.194_H1.279 Fab-Fc Heavy Chain

SEQ ID NO: 28328 - protein, 480 aa, Artificial Sequence; identical to SEQ ID NO: 2870
  Description of Artificial Sequence: Synthetic polypeptide
  XENP022742 [ICOS]_H0_L0.32_Fab-1G6_L1.194_H1.279 scFv-Fc Heavy Chain

SEQ ID NO: 28329 - protein, 214 aa, Artificial Sequence; identical to SEQ ID NO: 28002
  Description of Artificial Sequence: Synthetic polypeptide
  XENP022742 [ICOS]_H0_L0.32_Fab-1G6_L1.194_H1.279 Light Chain

SEQ ID NO: 28330 - protein, 454 aa, Artificial Sequence; identical to SEQ ID NO: 26442
  Description of Artificial Sequence: Synthetic polypeptide
  XENP022743 [ICOS]_H0_L0.33_Fab-1G6_L1.194_H1.279 Fab-Fc Heavy Chain

SEQ ID NO: 28331 - protein, 480 aa, Artificial Sequence; identical to SEQ ID NO: 2870
  Description of Artificial Sequence: Synthetic polypeptide
  XENP022743 [ICOS]_H0_L0.33_Fab-1G6_L1.194_H1.279 scFv-Fc Heavy Chain

SEQ ID NO: 28332 - protein, 214 aa, Artificial Sequence; identical to SEQ ID NO: 28004
  Description of Artificial Sequence: Synthetic polypeptide
  XENP022743 [ICOS]_H0_L0.33_Fab-1G6_L1.194_H1.279 Light Chain

SEQ ID NO: 28333 - protein, 454 aa, Artificial Sequence; identical to SEQ ID NO: 26442
  Description of Artificial Sequence: Synthetic polypeptide
  XENP022744 [ICOS]_H0_L0.34_Fab-1G6_L1.194_H1.279 Fab-Fc Heavy Chain

SEQ ID NO: 28334 - protein, 480 aa, Artificial Sequence; identical to SEQ ID NO: 2870
  Description of Artificial Sequence: Synthetic polypeptide
  XENP022744 [ICOS]_H0_L0.34_Fab-1G6_L1.194_H1.279 scFv-Fc Heavy Chain

SEQ ID NO: 28335 - protein, 214 aa, Artificial Sequence; identical to SEQ ID NO: 26497
  Description of Artificial Sequence: Synthetic polypeptide
  XENP022744 [ICOS]_H0_L0.34_Fab-1G6_L1.194_H1.279 Light Chain

SEQ ID NO: 28336 - protein, 454 aa, Artificial Sequence; identical to SEQ ID NO: 26442
  Description of Artificial Sequence: Synthetic polypeptide
  XENP022745 [ICOS]_H0_L0.35_Fab-1G6_L1.194_H1.279 Fab-Fc Heavy Chain

SEQ ID NO: 28337 - protein, 480 aa, Artificial Sequence; identical to SEQ ID NO: 2870
  Description of Artificial Sequence: Synthetic polypeptide
  XENP022745 [ICOS]_H0_L0.35_Fab-1G6_L1.194_H1.279 scFv-Fc Heavy Chain

SEQ ID NO: 28338 - protein, 214 aa, Artificial Sequence; identical to SEQ ID NO: 28008
  Description of Artificial Sequence: Synthetic polypeptide
  XENP022745 [ICOS]_H0_L0.35_Fab-1G6_L1.194_H1.279 Light Chain

SEQ ID NO: 28339 - protein, 454 aa, Artificial Sequence; identical to SEQ ID NO: 26442
  Description of Artificial Sequence: Synthetic polypeptide
  XENP022746 [ICOS]_H0_L0.36_Fab-1G6_L1.194_H1.279 Fab-Fc Heavy Chain

SEQ ID NO: 28340 - protein, 480 aa, Artificial Sequence; identical to SEQ ID NO: 2870
  Description of Artificial Sequence: Synthetic polypeptide
  XENP022746 [ICOS]_H0_L0.36_Fab-1G6_L1.194_H1.279 scFv-Fc Heavy Chain

SEQ ID NO: 28341 - protein, 214 aa, Artificial Sequence; identical to SEQ ID NO: 26517
  Description of Artificial Sequence: Synthetic polypeptide
  XENP022746 [ICOS]_H0_L0.36_Fab-1G6_L1.194_H1.279 Light Chain

SEQ ID NO: 28342 - protein, 454 aa, Artificial Sequence; identical to SEQ ID NO: 26442
  Description of Artificial Sequence: Synthetic polypeptide
  XENP022747 [ICOS]_H0_L0.37_Fab-1G6_L1.194_H1.279 Fab-Fc Heavy Chain

SEQ ID NO: 28343 - protein, 480 aa, Artificial Sequence; identical to SEQ ID NO: 2870
  Description of Artificial Sequence: Synthetic polypeptide
  XENP022747 [ICOS]_H0_L0.37_Fab-1G6_L1.194_H1.279 scFv-Fc Heavy Chain

SEQ ID NO: 28344 - protein, 214 aa, Artificial Sequence; identical to SEQ ID NO: 26537
  Description of Artificial Sequence: Synthetic polypeptide
  XENP022747 [ICOS]_H0_L0.37_Fab-1G6_L1.194_H1.279 Light Chain

SEQ ID NO: 28345 - protein, 454 aa, Artificial Sequence; identical to SEQ ID NO: 26442
  Description of Artificial Sequence: Synthetic polypeptide
  XENP022748 [ICOS]_H0_L0.38_Fab-1G6_L1.194_H1.279 Fab-Fc Heavy Chain

SEQ ID NO: 28346 - protein, 480 aa, Artificial Sequence; identical to SEQ ID NO: 2870
  Description of Artificial Sequence: Synthetic polypeptide
  XENP022748 [ICOS]_H0_L0.38_Fab-1G6_L1.194_H1.279 scFv-Fc Heavy Chain

SEQ ID NO: 28347 - protein, 214 aa, Artificial Sequence; identical to SEQ ID NO: 26557
  Description of Artificial Sequence: Synthetic polypeptide
  XENP022748 [ICOS]_H0_L0.38_Fab-1G6_L1.194_H1.279 Light Chain

SEQ ID NO: 28348 - protein, 454 aa, Artificial Sequence; identical to SEQ ID NO: 26442
  Description of Artificial Sequence: Synthetic polypeptide
  XENP022878 [ICOS]_H0_L0.42_Fab-1G6_L1.194_H1.279 Fab-Fc Heavy Chain

SEQ ID NO: 28349 - protein, 480 aa, Artificial Sequence; identical to SEQ ID NO: 2870
  Description of Artificial Sequence: Synthetic polypeptide
  XENP022878 [ICOS]_H0_L0.42_Fab-1G6_L1.194_H1.279 scFv-Fc Heavy Chain

SEQ ID NO: 28350 - protein, 214 aa, Artificial Sequence; identical to SEQ ID NO: 28016
  Description of Artificial Sequence: Synthetic polypeptide
  XENP022878 [ICOS]_H0_L0.42_Fab-1G6_L1.194_H1.279 Light Chain

SEQ ID NO: 28351 - protein, 454 aa, Artificial Sequence; identical to SEQ ID NO: 26442
  Description of Artificial Sequence: Synthetic polypeptide
  XENP022879 [ICOS]_H0_L0.43_Fab-1G6_L1.194_H1.279 Fab-Fc Heavy Chain

SEQ ID NO: 28352 - protein, 480 aa, Artificial Sequence; identical to SEQ ID NO: 2870
  Description of Artificial Sequence: Synthetic polypeptide
  XENP022879 [ICOS]_H0_L0.43_Fab-1G6_L1.194_H1.279 scFv-Fc Heavy Chain

SEQ ID NO: 28353 - protein, 214 aa, Artificial Sequence; identical to SEQ ID NO: 28018
  Description of Artificial Sequence: Synthetic polypeptide
  XENP022879 [ICOS]_H0_L0.43_Fab-1G6_L1.194_H1.279 Light Chain

SEQ ID NO: 28354 - protein, 454 aa, Artificial Sequence; identical to SEQ ID NO: 26442
  Description of Artificial Sequence: Synthetic polypeptide
  XENP022880 [ICOS]_H0_L0.44_Fab-1G6_L1.194_H1.279 Fab-Fc Heavy Chain

SEQ ID NO: 28355 - protein, 480 aa, Artificial Sequence; identical to SEQ ID NO: 2870
  Description of Artificial Sequence: Synthetic polypeptide
  XENP022880 [ICOS]_H0_L0.44_Fab-1G6_L1.194_H1.279 scFv-Fc Heavy Chain

SEQ ID NO: 28356 - protein, 214 aa, Artificial Sequence; identical to SEQ ID NO: 28020
  Description of Artificial Sequence: Synthetic polypeptide
  XENP022880 [ICOS]_H0_L0.44_Fab-1G6_L1.194_H1.279 Light Chain

SEQ ID NO: 28357 - protein, 454 aa, Artificial Sequence; identical to SEQ ID NO: 28174
  Description of Artificial Sequence: Synthetic polypeptide
  XENP022881 [ICOS]_H0.35_L0.38_Fab-1G6_L1.194_H1.279 Fab-Fc Heavy Chain

SEQ ID NO: 28358 - protein, 480 aa, Artificial Sequence; identical to SEQ ID NO: 2870
  Description of Artificial Sequence: Synthetic polypeptide
  XENP022881 [ICOS]_H0.35_L0.38_Fab-1G6_L1.194_H1.279 scFv-Fc Heavy Chain

SEQ ID NO: 28359 - protein, 214 aa, Artificial Sequence; identical to SEQ ID NO: 26557
  Description of Artificial Sequence: Synthetic polypeptide
  XENP022881 [ICOS]_H0.35_L0.38_Fab-1G6_L1.194_H1.279 Light Chain

SEQ ID NO: 28360 - protein, 454 aa, Artificial Sequence; identical to SEQ ID NO: 28174
  Description of Artificial Sequence: Synthetic polypeptide
  XENP022882 [ICOS]_H0.35_L0.42_Fab-1G6_L1.194_H1.279 Fab-Fc Heavy Chain

SEQ ID NO: 28361 - protein, 480 aa, Artificial Sequence; identical to SEQ ID NO: 2870
  Description of Artificial Sequence: Synthetic polypeptide
  XENP022882 [ICOS]_H0.35_L0.42_Fab-1G6_L1.194_H1.279 scFv-Fc Heavy Chain

SEQ ID NO: 28362 - protein, 214 aa, Artificial Sequence; identical to SEQ ID NO: 28016
  Description of Artificial Sequence: Synthetic polypeptide
  XENP022882 [ICOS]_H0.35_L0.42_Fab-1G6_L1.194_H1.279 Light Chain

SEQ ID NO: 28363 - protein, 454 aa, Artificial Sequence; identical to SEQ ID NO: 28174
  Description of Artificial Sequence: Synthetic polypeptide
  XENP022883 [ICOS]_H0.35_L0.43_Fab-1G6_L1.194_H1.279 Fab-Fc Heavy Chain

SEQ ID NO: 28364 - protein, 480 aa, Artificial Sequence; identical to SEQ ID NO: 2870
  Description of Artificial Sequence: Synthetic polypeptide
  XENP022883 [ICOS]_H0.35_L0.43_Fab-1G6_L1.194_H1.279 scFv-Fc Heavy Chain

SEQ ID NO: 28365 - protein, 214 aa, Artificial Sequence; identical to SEQ ID NO: 28018
  Description of Artificial Sequence: Synthetic polypeptide
  XENP022883 [ICOS]_H0.35_L0.43_Fab-1G6_L1.194_H1.279 Light Chain

SEQ ID NO: 28366 - protein, 454 aa, Artificial Sequence; identical to SEQ ID NO: 28174
  Description of Artificial Sequence: Synthetic polypeptide
  XENP022884 [ICOS]_H0.35_L0.44_Fab-1G6_L1.194_H1.279 Fab-Fc Heavy Chain

SEQ ID NO: 28367 - protein, 480 aa, Artificial Sequence; identical to SEQ ID NO: 2870
  Description of Artificial Sequence: Synthetic polypeptide
  XENP022884 [ICOS]_H0.35_L0.44_Fab-1G6_L1.194_H1.279 scFv-Fc Heavy Chain

SEQ ID NO: 28368 - protein, 214 aa, Artificial Sequence; identical to SEQ ID NO: 28020
  Description of Artificial Sequence: Synthetic polypeptide
  XENP022884 [ICOS]_H0.35_L0.44_Fab-1G6_L1.194_H1.279 Light Chain

SEQ ID NO: 28369 - protein, 454 aa, Artificial Sequence; identical to SEQ ID NO: 28186
  Description of Artificial Sequence: Synthetic polypeptide
  XENP022885 [ICOS]_H0.61_L0.38_Fab-1G6_L1.194_H1.279 Fab-Fc Heavy Chain

SEQ ID NO: 28370 - protein, 480 aa, Artificial Sequence; identical to SEQ ID NO: 2870
  Description of Artificial Sequence: Synthetic polypeptide
  XENP022885 [ICOS]_H0.61_L0.38_Fab-1G6_L1.194_H1.279 scFv-Fc Heavy Chain

SEQ ID NO: 28371 - protein, 214 aa, Artificial Sequence; identical to SEQ ID NO: 26557
  Description of Artificial Sequence: Synthetic polypeptide
  XENP022885 [ICOS]_H0.61_L0.38_Fab-1G6_L1.194_H1.279 Light Chain

SEQ ID NO: 28372 - protein, 454 aa, Artificial Sequence; identical to SEQ ID NO: 28186
  Description of Artificial Sequence: Synthetic polypeptide
  XENP022886 [ICOS]_H0.61_L0.42_Fab-1G6_L1.194_H1.279 Fab-Fc Heavy Chain

SEQ ID NO: 28373 - protein, 480 aa, Artificial Sequence; identical to SEQ ID NO: 2870
  Description of Artificial Sequence: Synthetic polypeptide
  XENP022886 [ICOS]_H0.61_L0.42_Fab-1G6_L1.194_H1.279 scFv-Fc Heavy Chain

SEQ ID NO: 28374 - protein, 214 aa, Artificial Sequence; identical to SEQ ID NO: 28016
  Description of Artificial Sequence: Synthetic polypeptide
  XENP022886 [ICOS]_H0.61_L0.42_Fab-1G6_L1.194_H1.279 Light Chain

SEQ ID NO: 28375 - protein, 454 aa, Artificial Sequence; identical to SEQ ID NO: 28186
  Description of Artificial Sequence: Synthetic polypeptide
  XENP022887 [ICOS]_H0.61_L0.43_Fab-1G6_L1.194_H1.279 Fab-Fc Heavy Chain

SEQ ID NO: 28376 - protein, 480 aa, Artificial Sequence; identical to SEQ ID NO: 2870
  Description of Artificial Sequence: Synthetic polypeptide
  XENP022887 [ICOS]_H0.61_L0.43_Fab-1G6_L1.194_H1.279 scFv-Fc Heavy Chain

SEQ ID NO: 28377 - protein, 214 aa, Artificial Sequence; identical to SEQ ID NO: 28018
  Description of Artificial Sequence: Synthetic polypeptide
  XENP022887 [ICOS]_H0.61_L0.43_Fab-1G6_L1.194_H1.279 Light Chain

SEQ ID NO: 28378 - protein, 454 aa, Artificial Sequence; identical to SEQ ID NO: 28186
  Description of Artificial Sequence: Synthetic polypeptide
  XENP022888 [ICOS]_H0.61_L0.44_Fab-1G6_L1.194_H1.279 Fab-Fc Heavy Chain

SEQ ID NO: 28379 - protein, 480 aa, Artificial Sequence; identical to SEQ ID NO: 2870
  Description of Artificial Sequence: Synthetic polypeptide
  XENP022888 [ICOS]_H0.61_L0.44_Fab-1G6_L1.194_H1.279 scFv-Fc Heavy Chain

SEQ ID NO: 28380 - protein, 214 aa, Artificial Sequence; identical to SEQ ID NO: 28020
  Description of Artificial Sequence: Synthetic polypeptide
  XENP022888 [ICOS]_H0.61_L0.44_Fab-1G6_L1.194_H1.279 Light Chain

SEQ ID NO: 28381 - protein, 454 aa, Artificial Sequence; identical to SEQ ID NO: 28198
  Description of Artificial Sequence: Synthetic polypeptide
  XENP022889 [ICOS]_H0.24_L0.38_Fab-1G6_L1.194_H1.279 Fab-Fc Heavy Chain

SEQ ID NO: 28382 - protein, 480 aa, Artificial Sequence; identical to SEQ ID NO: 2870
  Description of Artificial Sequence: Synthetic polypeptide
  XENP022889 [ICOS]_H0.24_L0.38_Fab-1G6_L1.194_H1.279 scFv-Fc Heavy Chain

SEQ ID NO: 28383 - protein, 214 aa, Artificial Sequence; identical to SEQ ID NO: 26557
  Description of Artificial Sequence: Synthetic polypeptide
  XENP022889 [ICOS]_H0.24_L0.38_Fab-1G6_L1.194_H1.279 Light Chain

SEQ ID NO: 28384 - protein, 454 aa, Artificial Sequence; identical to SEQ ID NO: 28201
  Description of Artificial Sequence: Synthetic polypeptide
  XENP022890 [ICOS]_H0.37_L0.38_Fab-1G6_L1.194_H1.279 Fab-Fc Heavy Chain

SEQ ID NO: 28385 - protein, 480 aa, Artificial Sequence; identical to SEQ ID NO: 2870
  Description of Artificial Sequence: Synthetic polypeptide
  XENP022890 [ICOS]_H0.37_L0.38_Fab-1G6_L1.194_H1.279 scFv-Fc Heavy Chain

SEQ ID NO: 28386 - protein, 214 aa, Artificial Sequence; identical to SEQ ID NO: 26557
  Description of Artificial Sequence: Synthetic polypeptide
  XENP022890 [ICOS]_H0.37_L0.38_Fab-1G6_L1.194_H1.279 Light Chain

SEQ ID NO: 28387 - protein, 454 aa, Artificial Sequence; identical to SEQ ID NO: 28204
  Description of Artificial Sequence: Synthetic polypeptide
  XENP022891 [ICOS]_H0.40_L0.38_Fab-1G6_L1.194_H1.279 Fab-Fc Heavy Chain

SEQ ID NO: 28388 - protein, 480 aa, Artificial Sequence; identical to SEQ ID NO: 2870
  Description of Artificial Sequence: Synthetic polypeptide
  XENP022891 [ICOS]_H0.40_L0.38_Fab-1G6_L1.194_H1.279 scFv-Fc Heavy Chain

SEQ ID NO: 28389 - protein, 214 aa, Artificial Sequence; identical to SEQ ID NO: 26557
  Description of Artificial Sequence: Synthetic polypeptide
  XENP022891 [ICOS]_H0.40_L0.38_Fab-1G6_L1.194_H1.279 Light Chain

SEQ ID NO: 28390 - protein, 454 aa, Artificial Sequence; identical to SEQ ID NO: 28207
  Description of Artificial Sequence: Synthetic polypeptide
  XENP022892 [ICOS]_H0.44_L0.38_Fab-1G6_L1.194_H1.279 Fab-Fc Heavy Chain

SEQ ID NO: 28391 - protein, 480 aa, Artificial Sequence; identical to SEQ ID NO: 2870
  Description of Artificial Sequence: Synthetic polypeptide
  XENP022892 [ICOS]_H0.44_L0.38_Fab-1G6_L1.194_H1.279 scFv-Fc Heavy Chain

SEQ ID NO: 28392 - protein, 214 aa, Artificial Sequence; identical to SEQ ID NO: 26557
  Description of Artificial Sequence: Synthetic polypeptide
  XENP022892 [ICOS]_H0.44_L0.38_Fab-1G6_L1.194_H1.279 Light Chain

SEQ ID NO: 28393 - protein, 454 aa, Artificial Sequence; identical to SEQ ID NO: 28210
  Description of Artificial Sequence: Synthetic polypeptide
  XENP022893 [ICOS]_H0.56_L0.38_Fab-1G6_L1.194_H1.279 Fab-Fc Heavy Chain

SEQ ID NO: 28394 - protein, 480 aa, Artificial Sequence; identical to SEQ ID NO: 2870
  Description of Artificial Sequence: Synthetic polypeptide
  XENP022893 [ICOS]_H0.56_L0.38_Fab-1G6_L1.194_H1.279 scFv-Fc Heavy Chain

SEQ ID NO: 28395 - protein, 214 aa, Artificial Sequence; identical to SEQ ID NO: 26557
  Description of Artificial Sequence: Synthetic polypeptide
  XENP022893 [ICOS]_H0.56_L0.38_Fab-1G6_L1.194_H1.279 Light Chain

SEQ ID NO: 28396 - protein, 454 aa, Artificial Sequence; identical to SEQ ID NO: 28213
  Description of Artificial Sequence: Synthetic polypeptide
  XENP022894 [ICOS]_H0.62_L0.38_Fab-1G6_L1.194_H1.279 Fab-Fc Heavy Chain

SEQ ID NO: 28397 - protein, 480 aa, Artificial Sequence; identical to SEQ ID NO: 2870
  Description of Artificial Sequence: Synthetic polypeptide
  XENP022894 [ICOS]_H0.62_L0.38_Fab-1G6_L1.194_H1.279 scFv-Fc Heavy Chain

SEQ ID NO: 28398 - protein, 214 aa, Artificial Sequence; identical to SEQ ID NO: 26557
  Description of Artificial Sequence: Synthetic polypeptide
  XENP022894 [ICOS]_H0.62_L0.38_Fab-1G6_L1.194_H1.279 Light Chain

SEQ ID NO: 28399 - protein, 454 aa, Artificial Sequence; identical to SEQ ID NO: 28174
  Description of Artificial Sequence: Synthetic polypeptide
  XENP022931 [ICOS]_H0.35_L0.36_Fab-1G6_L1.194_H1.279 Fab-Fc Heavy Chain

SEQ ID NO: 28400 - protein, 480 aa, Artificial Sequence; identical to SEQ ID NO: 2870
  Description of Artificial Sequence: Synthetic polypeptide
  XENP022931 [ICOS]_H0.35_L0.36_Fab-1G6_L1.194_H1.279 scFv-Fc Heavy Chain

SEQ ID NO: 28401 - protein, 214 aa, Artificial Sequence; identical to SEQ ID NO: 26517
  Description of Artificial Sequence: Synthetic polypeptide
  XENP022931 [ICOS]_H0.35_L0.36_Fab-1G6_L1.194_H1.279 Light Chain

SEQ ID NO: 28402 - protein, 454 aa, Artificial Sequence; identical to SEQ ID NO: 28186
  Description of Artificial Sequence: Synthetic polypeptide
  XENP022932 [ICOS]_H0.61_L0.36_Fab-1G6_L1.194_H1.279 Fab-Fc Heavy Chain

SEQ ID NO: 28403 - protein, 480 aa, Artificial Sequence; identical to SEQ ID NO: 2870
  Description of Artificial Sequence: Synthetic polypeptide
  XENP022932 [ICOS]_H0.61_L0.36_Fab-1G6_L1.194_H1.279 scFv-Fc Heavy Chain

SEQ ID NO: 28404 - protein, 214 aa, Artificial Sequence; identical to SEQ ID NO: 26517
  Description of Artificial Sequence: Synthetic polypeptide
  XENP022932 [ICOS]_H0.61_L0.36_Fab-1G6_L1.194_H1.279 Light Chain

SEQ ID NO: 28405 - protein, 454 aa, Artificial Sequence; identical to SEQ ID NO: 26362
  Description of Artificial Sequence: Synthetic polypeptide
  XENP022935 [ICOS]_H0_L0.36_Fab-1G6_L1.194_H1.279 Fab-Fc Heavy Chain

SEQ ID NO: 28406 - protein, 480 aa, Artificial Sequence; identical to SEQ ID NO: 2930
  Description of Artificial Sequence: Synthetic polypeptide
  XENP022935 [ICOS]_H0_L0.36_Fab-1G6_L1.194_H1.279 scFv-Fc Heavy Chain

SEQ ID NO: 28407 - protein, 214 aa, Artificial Sequence; identical to SEQ ID NO: 26517
  Description of Artificial Sequence: Synthetic polypeptide
  XENP022935 [ICOS]_H0_L0.36_Fab-1G6_L1.194_H1.279 Light Chain

SEQ ID NO: 28408 - protein, 454 aa, Artificial Sequence
  Description of Artificial Sequence: Synthetic polypeptide
  XENP022936 [ICOS]_H0.35_L0.36_Fab-1G6_L1.194_H1.279 Fab-Fc Heavy Chain
QVQLVQSGAEVKKPGASVKVSCKASGYTFTGYYMHWVRQAPGQGLEWMGWINPHSGGTNYAQKFQGRVTMTRDTSISTAYMELSRLRSDDTAVYYCARTYYYDTSGYYHDAFDVWGQGTMVTVSSASTKGPSVFPLAPSSKSTSGGTAALGCLVKDYFPEPVTVSWNSGALTSGVHTFPAVLQSSGLYSLSSVVTVPSSSLGTQTYICNVNHKPSDTKVDKKVEPKSCDKTHTCPPCPAPPVAGPSVFLFPPKPKDTLMISRTPEVTCVVVDVKHEDPEVKFNWYVDGVEVHNAKTKPREEEYNSTYRVVSVLTVLHQDWLNGKEYKCKVSNKALPAPIEKTISKAKGQPREPQVYTLPPSREEMTKNQVSLTCDVSGFYPSDIAVEWESDGQPENNYKTTPPVLDSDGSFFLYSKLTVDKSRWEQGDVFSCSVLHEALHSHYTQKSLSLSPGK

SEQ ID NO: 28409 - protein, 480 aa, Artificial Sequence; identical to SEQ ID NO: 2930
  Description of Artificial Sequence: Synthetic polypeptide
  XENP022936 [ICOS]_H0.35_L0.36_Fab-1G6_L1.194_H1.279 scFv-Fc Heavy Chain

SEQ ID NO: 28410 - protein, 214 aa, Artificial Sequence; identical to SEQ ID NO: 26517
  Description of Artificial Sequence: Synthetic polypeptide
  XENP022936 [ICOS]_H0.35_L0.36_Fab-1G6_L1.194_H1.279 Light Chain

SEQ ID NO: 28411 - protein, 454 aa, Artificial Sequence
  Description of Artificial Sequence: Synthetic polypeptide
  XENP022937 [ICOS]_H0.61_L0.36_Fab-1G6_L1.194_H1.279 Fab-Fc Heavy Chain
QVQLVQSGAEVKKPGASVKVSCKASGYTFTGYYMHWVRQAPGQGLEWMGIINPHSGGTNYAQKFQGRVTMTRDTSISTAYMELSRLRSDDTAVYYCARTYYYDTSGYYHDAFDVWGQGTMVTVSSASTKGPSVFPLAPSSKSTSGGTAALGCLVKDYFPEPVTVSWNSGALTSGVHTFPAVLQSSGLYSLSSVVTVPSSSLGTQTYICNVNHKPSDTKVDKKVEPKSCDKTHTCPPCPAPPVAGPSVFLFPPKPKDTLMISRTPEVTCVVVDVKHEDPEVKFNWYVDGVEVHNAKTKPREEEYNSTYRVVSVLTVLHQDWLNGKEYKCKVSNKALPAPIEKTISKAKGQPREPQVYTLPPSREEMTKNQVSLTCDVSGFYPSDIAVEWESDGQPENNYKTTPPVLDSDGSFFLYSKLTVDKSRWEQGDVFSCSVLHEALHSHYTQKSLSLSPGK

SEQ ID NO: 28412 - protein, 480 aa, Artificial Sequence; identical to SEQ ID NO: 2930
  Description of Artificial Sequence: Synthetic polypeptide
  XENP022937 [ICOS]_H0.61_L0.36_Fab-1G6_L1.194_H1.279 scFv-Fc Heavy Chain

SEQ ID NO: 28413 - protein, 214 aa, Artificial Sequence; identical to SEQ ID NO: 26517
  Description of Artificial Sequence: Synthetic polypeptide
  XENP022937 [ICOS]_H0.61_L0.36_Fab-1G6_L1.194_H1.279 Light Chain

SEQ ID NO: 28414 - protein, 454 aa, Artificial Sequence; identical to SEQ ID NO: 28198
  Description of Artificial Sequence: Synthetic polypeptide
  XENP022950 [ICOS]_H0.24_L0.37_Fab-1G6_L1.194_H1.279 Fab-Fc Heavy Chain

SEQ ID NO: 28415 - protein, 480 aa, Artificial Sequence; identical to SEQ ID NO: 2870
  Description of Artificial Sequence: Synthetic polypeptide
  XENP022950 [ICOS]_H0.24_L0.37_Fab-1G6_L1.194_H1.279 scFv-Fc Heavy Chain

SEQ ID NO: 28416 - protein, 214 aa, Artificial Sequence; identical to SEQ ID NO: 26537
  Description of Artificial Sequence: Synthetic polypeptide
  XENP022950 [ICOS]_H0.24_L0.37_Fab-1G6_L1.194_H1.279 Light Chain

SEQ ID NO: 28417 - protein, 454 aa, Artificial Sequence; identical to SEQ ID NO: 28201
  Description of Artificial Sequence: Synthetic polypeptide
  XENP022951 [ICOS]_H0.37_L0.37_Fab-1G6_L1.194_H1.279 Fab-Fc Heavy Chain

SEQ ID NO: 28418 - protein, 480 aa, Artificial Sequence; identical to SEQ ID NO: 2870
  Description of Artificial Sequence: Synthetic polypeptide
  XENP022951 [ICOS]_H0.37_L0.37_Fab-1G6_L1.194_H1.279 scFv-Fc Heavy Chain

SEQ ID NO: 28419 - protein, 214 aa, Artificial Sequence; identical to SEQ ID NO: 26537
  Description of Artificial Sequence: Synthetic polypeptide
  XENP022951 [ICOS]_H0.37_L0.37_Fab-1G6_L1.194_H1.279 Light Chain

SEQ ID NO: 28420 - protein, 454 aa, Artificial Sequence; identical to SEQ ID NO: 28204
  Description of Artificial Sequence: Synthetic polypeptide
  XENP022952 [ICOS]_H0.40_L0.37_Fab-1G6_L1.194_H1.279 Fab-Fc Heavy Chain

SEQ ID NO: 28421 - protein, 480 aa, Artificial Sequence; identical to SEQ ID NO: 2870
  Description of Artificial Sequence: Synthetic polypeptide
  XENP022952 [ICOS]_H0.40_L0.37_Fab-1G6_L1.194_H1.279 scFv-Fc Heavy Chain

SEQ ID NO: 28422 - protein, 214 aa, Artificial Sequence; identical to SEQ ID NO: 26537
  Description of Artificial Sequence: Synthetic polypeptide
  XENP022952 [ICOS]_H0.40_L0.37_Fab-1G6_L1.194_H1.279 Light Chain

SEQ ID NO: 28423 - protein, 454 aa, Artificial Sequence; identical to SEQ ID NO: 28207
  Description of Artificial Sequence: Synthetic polypeptide
  XENP022953 [ICOS]_H0.44_L0.37_Fab-1G6_L1.194_H1.279 Fab-Fc Heavy Chain

SEQ ID NO: 28424 - protein, 480 aa, Artificial Sequence; identical to SEQ ID NO: 2870
  Description of Artificial Sequence: Synthetic polypeptide
  XENP022953 [ICOS]_H0.44_L0.37_Fab-1G6_L1.194_H1.279 scFv-Fc Heavy Chain

SEQ ID NO: 28425 - protein, 214 aa, Artificial Sequence; identical to SEQ ID NO: 26537
  Description of Artificial Sequence: Synthetic polypeptide
  XENP022953 [ICOS]_H0.44_L0.37_Fab-1G6_L1.194_H1.279 Light Chain

SEQ ID NO: 28426 - protein, 454 aa, Artificial Sequence; identical to SEQ ID NO: 28210
  Description of Artificial Sequence: Synthetic polypeptide
  XENP022954 [ICOS]_H0.56_L0.37_Fab-1G6_L1.194_H1.279 Fab-Fc Heavy Chain

SEQ ID NO: 28427 - protein, 480 aa, Artificial Sequence; identical to SEQ ID NO: 2870
  Description of Artificial Sequence: Synthetic polypeptide
  XENP022954 [ICOS]_H0.56_L0.37_Fab-1G6_L1.194_H1.279 scFv-Fc Heavy Chain

SEQ ID NO: 28428 - protein, 214 aa, Artificial Sequence; identical to SEQ ID NO: 26537
  Description of Artificial Sequence: Synthetic polypeptide
  XENP022954 [ICOS]_H0.56_L0.37_Fab-1G6_L1.194_H1.279 Light Chain

SEQ ID NO: 28429 - protein, 454 aa, Artificial Sequence; identical to SEQ ID NO: 28213
  Description of Artificial Sequence: Synthetic polypeptide
  XENP022955 [ICOS]_H0.62_L0.37_Fab-1G6_L1.194_H1.279 Fab-Fc Heavy Chain

SEQ ID NO: 28430 - protein, 480 aa, Artificial Sequence; identical to SEQ ID NO: 2870
  Description of Artificial Sequence: Synthetic polypeptide
  XENP022955 [ICOS]_H0.62_L0.37_Fab-1G6_L1.194_H1.279 scFv-Fc Heavy Chain

SEQ ID NO: 28431 - protein, 214 aa, Artificial Sequence; identical to SEQ ID NO: 26537
  Description of Artificial Sequence: Synthetic polypeptide
  XENP022955 [ICOS]_H0.62_L0.37_Fab-1G6_L1.194_H1.279 Light Chain

SEQ ID NO: 28432 - protein, 454 aa, Artificial Sequence; identical to SEQ ID NO: 28174
  Description of Artificial Sequence: Synthetic polypeptide
  XENP022956 [ICOS]_H0.35_L0.34_Fab-1G6_L1.194_H1.279 Fab-Fc Heavy Chain

SEQ ID NO: 28433 - protein, 480 aa, Artificial Sequence; identical to SEQ ID NO: 2870
  Description of Artificial Sequence: Synthetic polypeptide
  XENP022956 [ICOS]_H0.35_L0.34_Fab-1G6_L1.194_H1.279 scFv-Fc Heavy Chain

SEQ ID NO: 28434 - protein, 214 aa, Artificial Sequence; identical to SEQ ID NO: 26497
  Description of Artificial Sequence: Synthetic polypeptide
  XENP022956 [ICOS]_H0.35_L0.34_Fab-1G6_L1.194_H1.279 Light Chain

SEQ ID NO: 28435 - protein, 454 aa, Artificial Sequence; identical to SEQ ID NO: 28174
  Description of Artificial Sequence: Synthetic polypeptide
  XENP022957 [ICOS]_H0.35_L0.35_Fab-1G6_L1.194_H1.279 Fab-Fc Heavy Chain

SEQ ID NO: 28436 - protein, 480 aa, Artificial Sequence; identical to SEQ ID NO: 2870
  Description of Artificial Sequence: Synthetic polypeptide
  XENP022957 [ICOS]_H0.35_L0.35_Fab-1G6_L1.194_H1.279 scFv-Fc Heavy Chain

SEQ ID NO: 28437 - protein, 214 aa, Artificial Sequence; identical to SEQ ID NO: 28008
  Description of Artificial Sequence: Synthetic polypeptide
  XENP022957 [ICOS]_H0.35_L0.35_Fab-1G6_L1.194_H1.279 Light Chain

SEQ ID NO: 28438 - protein, 454 aa, Artificial Sequence; identical to SEQ ID NO: 28174
  Description of Artificial Sequence: Synthetic polypeptide
  XENP022958 [ICOS]_H0.35_L0.37_Fab-1G6_L1.194_H1.279 Fab-Fc Heavy Chain

SEQ ID NO: 28439 - protein, 480 aa, Artificial Sequence; identical to SEQ ID NO: 2870
  Description of Artificial Sequence: Synthetic polypeptide
  XENP022958 [ICOS]_H0.35_L0.37_Fab-1G6_L1.194_H1.279 scFv-Fc Heavy Chain

SEQ ID NO: 28440 - protein, 214 aa, Artificial Sequence; identical to SEQ ID NO: 26537
  Description of Artificial Sequence: Synthetic polypeptide
  XENP022958 [ICOS]_H0.35_L0.37_Fab-1G6_L1.194_H1.279 Light Chain

SEQ ID NO: 28441 - protein, 454 aa, Artificial Sequence; identical to SEQ ID NO: 28186
  Description of Artificial Sequence: Synthetic polypeptide
  XENP022959 [ICOS]_H0.61_L0.34_Fab-1G6_L1.194_H1.279 Fab-Fc Heavy Chain

SEQ ID NO: 28442 - protein, 480 aa, Artificial Sequence; identical to SEQ ID NO: 2870
  Description of Artificial Sequence: Synthetic polypeptide
  XENP022959 [ICOS]_H0.61_L0.34_Fab-1G6_L1.194_H1.279 scFv-Fc Heavy Chain

SEQ ID NO: 28443 - protein, 214 aa, Artificial Sequence; identical to SEQ ID NO: 26497
  Description of Artificial Sequence: Synthetic polypeptide
  XENP022959 [ICOS]_H0.61_L0.34_Fab-1G6_L1.194_H1.279 Light Chain

SEQ ID NO: 28444 - protein, 454 aa, Artificial Sequence; identical to SEQ ID NO: 28186
  Description of Artificial Sequence: Synthetic polypeptide
  XENP022960 [ICOS]_H0.61_L0.35_Fab-1G6_L1.194_H1.279 Fab-Fc Heavy Chain

SEQ ID NO: 28445 - protein, 480 aa, Artificial Sequence; identical to SEQ ID NO: 2870
  Description of Artificial Sequence: Synthetic polypeptide
  XENP022960 [ICOS]_H0.61_L0.35_Fab-1G6_L1.194_H1.279 scFv-Fc Heavy Chain

SEQ ID NO: 28446 - protein, 214 aa, Artificial Sequence; identical to SEQ ID NO: 28008
  Description of Artificial Sequence: Synthetic polypeptide
  XENP022960 [ICOS]_H0.61_L0.35_Fab-1G6_L1.194_H1.279 Light Chain

SEQ ID NO: 28447 - protein, 454 aa, Artificial Sequence; identical to SEQ ID NO: 28186
  Description of Artificial Sequence: Synthetic polypeptide
  XENP022961 [ICOS]_H0.61_L0.37_Fab-1G6_L1.194_H1.279 Fab-Fc Heavy Chain

SEQ ID NO: 28448 - protein, 480 aa, Artificial Sequence; identical to SEQ ID NO: 2870
  Description of Artificial Sequence: Synthetic polypeptide
  XENP022961 [ICOS]_H0.61_L0.37_Fab-1G6_L1.194_H1.279 scFv-Fc Heavy Chain

SEQ ID NO: 28449 - protein, 214 aa, Artificial Sequence; identical to SEQ ID NO: 26537
  Description of Artificial Sequence: Synthetic polypeptide
  XENP022961 [ICOS]_H0.61_L0.37_Fab-1G6_L1.194_H1.279 Light Chain

SEQ ID NO: 28450 - protein, 454 aa, Artificial Sequence; identical to SEQ ID NO: 28201
  Description of Artificial Sequence: Synthetic polypeptide
  XENP023090 [ICOS]_H0.37_L0_Fab-1G6_L1.194_H1.279 Fab-Fc Heavy Chain

SEQ ID NO: 28451 - protein, 480 aa, Artificial Sequence; identical to SEQ ID NO: 2870
  Description of Artificial Sequence: Synthetic polypeptide
  XENP023090 [ICOS]_H0.37_L0_Fab-1G6_L1.194_H1.279 scFv-Fc Heavy Chain

SEQ ID NO: 28452 - protein, 214 aa, Artificial Sequence; identical to SEQ ID NO: 26297
  Description of Artificial Sequence: Synthetic polypeptide
  XENP023090 [ICOS]_H0.37_L0_Fab-1G6_L1.194_H1.279 Light Chain

SEQ ID NO: 28453 - protein, 454 aa, Artificial Sequence; identical to SEQ ID NO: 28261
  Description of Artificial Sequence: Synthetic polypeptide
  XENP023091 [ICOS]_H0.64_L0_Fab-1G6_L1.194_H1.279 Fab-Fc Heavy Chain

SEQ ID NO: 28454 - protein, 480 aa, Artificial Sequence; identical to SEQ ID NO: 2870
  Description of Artificial Sequence: Synthetic polypeptide
  XENP023091 [ICOS]_H0.64_L0_Fab-1G6_L1.194_H1.279 scFv-Fc Heavy Chain

SEQ ID NO: 28455 - protein, 214 aa, Artificial Sequence; identical to SEQ ID NO: 26297
  Description of Artificial Sequence: Synthetic polypeptide
  XENP023091 [ICOS]_H0.64_L0_Fab-1G6_L1.194_H1.279 Light Chain

SEQ ID NO: 28456 - protein, 454 aa, Artificial Sequence; identical to SEQ ID NO: 26562
  Description of Artificial Sequence: Synthetic polypeptide
  XENP023092 [ICOS]_H0.66_L0_Fab-1G6_L1.194_H1.279 Fab-Fc Heavy Chain

SEQ ID NO: 28457 - protein, 480 aa, Artificial Sequence; identical to SEQ ID NO: 2870
  Description of Artificial Sequence: Synthetic polypeptide
  XENP023092 [ICOS]_H0.66_L0_Fab-1G6_L1.194_H1.279 scFv-Fc Heavy Chain

SEQ ID NO: 28458 - protein, 214 aa, Artificial Sequence; identical to SEQ ID NO: 26297
  Description of Artificial Sequence: Synthetic polypeptide
  XENP023092 [ICOS]_H0.66_L0_Fab-1G6_L1.194_H1.279 Light Chain

SEQ ID NO: 28459 - protein, 454 aa, Artificial Sequence; identical to SEQ ID NO: 28267
  Description of Artificial Sequence: Synthetic polypeptide
  XENP023093 [ICOS]_H0.67_L0_Fab-1G6_L1.194_H1.279 Fab-Fc Heavy Chain

SEQ ID NO: 28460 - protein, 480 aa, Artificial Sequence; identical to SEQ ID NO: 2870
  Description of Artificial Sequence: Synthetic polypeptide
  XENP023093 [ICOS]_H0.67_L0_Fab-1G6_L1.194_H1.279 scFv-Fc Heavy Chain

SEQ ID NO: 28461 - protein, 214 aa, Artificial Sequence; identical to SEQ ID NO: 26297
  Description of Artificial Sequence: Synthetic polypeptide
  XENP023093 [ICOS]_H0.67_L0_Fab-1G6_L1.194_H1.279 Light Chain

SEQ ID NO: 28462 - protein, 454 aa, Artificial Sequence; identical to SEQ ID NO: 26562
  Description of Artificial Sequence: Synthetic polypeptide
  XENP023410 [ICOS]_H0.66_L0.34_Fab-1G6_L1.194_H1.279 Fab-Fc Heavy Chain

SEQ ID NO: 28463 - protein, 480 aa, Artificial Sequence; identical to SEQ ID NO: 2870
  Description of Artificial Sequence: Synthetic polypeptide
  XENP023410 [ICOS]_H0.66_L0.34_Fab-1G6_L1.194_H1.279 scFv-Fc Heavy Chain

SEQ ID NO: 28464 - protein, 214 aa, Artificial Sequence; identical to SEQ ID NO: 26497
  Description of Artificial Sequence: Synthetic polypeptide
  XENP023410 [ICOS]_H0.66_L0.34_Fab-1G6_L1.194_H1.279 Light Chain

SEQ ID NO: 28465 - protein, 454 aa, Artificial Sequence; identical to SEQ ID NO: 26362
  Description of Artificial Sequence: Synthetic polypeptide
  XENP022730 [ICOS]_H0L0 _Fab-1G6_L1.194_H1.279 Fab-Fc Heavy Chain

SEQ ID NO: 28466 - protein, 480 aa, Artificial Sequence; identical to SEQ ID NO: 2930
  Description of Artificial Sequence: Synthetic polypeptide
  XENP022730 [ICOS]_H0L0 _Fab-1G6_L1.194_H1.279 scFv-Fc Heavy Chain

SEQ ID NO: 28467 - protein, 214 aa, Artificial Sequence; identical to SEQ ID NO: 26297
  Description of Artificial Sequence: Synthetic polypeptide
  XENP022730 [ICOS]_H0L0_Fab-1G6_L1.194_H1.279 Light Chain

SEQ ID NO: 28468 - protein, 454 aa, Artificial Sequence; identical to SEQ ID NO: 26362
  Description of Artificial Sequence: Synthetic polypeptide
  XENP022917 [ICOS]_H0_L0.38_Fab-1G6_L1.194_H1.279 Fab-Fc Heavy Chain

SEQ ID NO: 28469 - protein, 480 aa, Artificial Sequence; identical to SEQ ID NO: 2930
  Description of Artificial Sequence: Synthetic polypeptide
  XENP022917 [ICOS]_H0_L0.38_Fab-1G6_L1.194_H1.279 scFv-Fc Heavy Chain

SEQ ID NO: 28470 - protein, 214 aa, Artificial Sequence; identical to SEQ ID NO: 26557
  Description of Artificial Sequence: Synthetic polypeptide
  XENP022917 [ICOS]_H0_L0.38_Fab-1G6_L1.194_H1.279 Light Chain

SEQ ID NO: 28471 - protein, 454 aa, Artificial Sequence; identical to SEQ ID NO: 26362
  Description of Artificial Sequence: Synthetic polypeptide
  XENP022918 [ICOS]_H0_L0.42_Fab-1G6_L1.194_H1.279 Fab-Fc Heavy Chain

SEQ ID NO: 28472 - protein, 480 aa, Artificial Sequence; identical to SEQ ID NO: 2930
  Description of Artificial Sequence: Synthetic polypeptide
  XENP022918 [ICOS]_H0_L0.42_Fab-1G6_L1.194_H1.279 scFv-Fc Heavy Chain

SEQ ID NO: 28473 - protein, 214 aa, Artificial Sequence; identical to SEQ ID NO: 28016
  Description of Artificial Sequence: Synthetic polypeptide
  XENP022918 [ICOS]_H0_L0.42_Fab-1G6_L1.194_H1.279 Light Chain

SEQ ID NO: 28474 - protein, 454 aa, Artificial Sequence; identical to SEQ ID NO: 26362
  Description of Artificial Sequence: Synthetic polypeptide
  XENP022919 [ICOS]_H0_L0.43_Fab-1G6_L1.194_H1.279 Fab-Fc Heavy Chain

SEQ ID NO: 28475 - protein, 480 aa, Artificial Sequence; identical to SEQ ID NO: 2930
  Description of Artificial Sequence: Synthetic polypeptide
  XENP022919 [ICOS]_H0_L0.43_Fab-1G6_L1.194_H1.279 scFv-Fc Heavy Chain

SEQ ID NO: 28476 - protein, 214 aa, Artificial Sequence; identical to SEQ ID NO: 28018
  Description of Artificial Sequence: Synthetic polypeptide
  XENP022919 [ICOS]_H0_L0.43_Fab-1G6_L1.194_H1.279 Light Chain

SEQ ID NO: 28477 - protein, 454 aa, Artificial Sequence; identical to SEQ ID NO: 26362
  Description of Artificial Sequence: Synthetic polypeptide
  XENP022920 [ICOS]_H0_L0.44_Fab-1G6_L1.194_H1.279 Fab-Fc Heavy Chain

SEQ ID NO: 28478 - protein, 480 aa, Artificial Sequence; identical to SEQ ID NO: 2930
  Description of Artificial Sequence: Synthetic polypeptide
  XENP022920 [ICOS]_H0_L0.44_Fab-1G6_L1.194_H1.279 scFv-Fc Heavy Chain

SEQ ID NO: 28479 - protein, 214 aa, Artificial Sequence; identical to SEQ ID NO: 28020
  Description of Artificial Sequence: Synthetic polypeptide
  XENP022920 [ICOS]_H0_L0.44_Fab-1G6_L1.194_H1.279 Light Chain

SEQ ID NO: 28480 - protein, 454 aa, Artificial Sequence; identical to SEQ ID NO: 28408
  Description of Artificial Sequence: Synthetic polypeptide
  XENP022921 [ICOS]_H0.35_L0.38_Fab-1G6_L1.194_H1.279 Fab-Fc Heavy Chain

SEQ ID NO: 28481 - protein, 480 aa, Artificial Sequence; identical to SEQ ID NO: 2930
  Description of Artificial Sequence: Synthetic polypeptide
  XENP022921 [ICOS]_H0.35_L0.38_Fab-1G6_L1.194_H1.279 scFv-Fc Heavy Chain

SEQ ID NO: 28482 - protein, 214 aa, Artificial Sequence; identical to SEQ ID NO: 26557
  Description of Artificial Sequence: Synthetic polypeptide
  XENP022921 [ICOS]_H0.35_L0.38_Fab-1G6_L1.194_H1.279 Light Chain

SEQ ID NO: 28483 - protein, 454 aa, Artificial Sequence; identical to SEQ ID NO: 28408
  Description of Artificial Sequence: Synthetic polypeptide
  XENP022922 [ICOS]_H0.35_L0.42_Fab-1G6_L1.194_H1.279 Fab-Fc Heavy Chain

SEQ ID NO: 28484 - protein, 480 aa, Artificial Sequence; identical to SEQ ID NO: 2930
  Description of Artificial Sequence: Synthetic polypeptide
  XENP022922 [ICOS]_H0.35_L0.42_Fab-1G6_L1.194_H1.279 scFv-Fc Heavy Chain

SEQ ID NO: 28485 - protein, 214 aa, Artificial Sequence; identical to SEQ ID NO: 28016
  Description of Artificial Sequence: Synthetic polypeptide
  XENP022922 [ICOS]_H0.35_L0.42_Fab-1G6_L1.194_H1.279 Light Chain

SEQ ID NO: 28486 - protein, 454 aa, Artificial Sequence; identical to SEQ ID NO: 28408
  Description of Artificial Sequence: Synthetic polypeptide
  XENP022923 [ICOS]_H0.35_L0.43_Fab-1G6_L1.194_H1.279 Fab-Fc Heavy Chain

SEQ ID NO: 28487 - protein, 480 aa, Artificial Sequence; identical to SEQ ID NO: 2930
  Description of Artificial Sequence: Synthetic polypeptide
  XENP022923 [ICOS]_H0.35_L0.43_Fab-1G6_L1.194_H1.279 scFv-Fc Heavy Chain

SEQ ID NO: 28488 - protein, 214 aa, Artificial Sequence; identical to SEQ ID NO: 28018
  Description of Artificial Sequence: Synthetic polypeptide
  XENP022923 [ICOS]_H0.35_L0.43_Fab-1G6_L1.194_H1.279 Light Chain

SEQ ID NO: 28489 - protein, 454 aa, Artificial Sequence; identical to SEQ ID NO: 28408
  Description of Artificial Sequence: Synthetic polypeptide
  XENP022924 [ICOS]_H0.35_L0.44_Fab-1G6_L1.194_H1.279 Fab-Fc Heavy Chain

SEQ ID NO: 28490 - protein, 480 aa, Artificial Sequence; identical to SEQ ID NO: 2930
  Description of Artificial Sequence: Synthetic polypeptide
  XENP022924 [ICOS]_H0.35_L0.44_Fab-1G6_L1.194_H1.279 scFv-Fc Heavy Chain

SEQ ID NO: 28491 - protein, 214 aa, Artificial Sequence; identical to SEQ ID NO: 28020
  Description of Artificial Sequence: Synthetic polypeptide
  XENP022924 [ICOS]_H0.35_L0.44_Fab-1G6_L1.194_H1.279 Light Chain

SEQ ID NO: 28492 - protein, 454 aa, Artificial Sequence; identical to SEQ ID NO: 28411
  Description of Artificial Sequence: Synthetic polypeptide
  XENP022925 [ICOS]_H0.61_L0.38_Fab-1G6_L1.194_H1.279 Fab-Fc Heavy Chain

SEQ ID NO: 28493 - protein, 480 aa, Artificial Sequence; identical to SEQ ID NO: 2930
  Description of Artificial Sequence: Synthetic polypeptide
  XENP022925 [ICOS]_H0.61_L0.38_Fab-1G6_L1.194_H1.279 scFv-Fc Heavy Chain

SEQ ID NO: 28494 - protein, 214 aa, Artificial Sequence; identical to SEQ ID NO: 26557
  Description of Artificial Sequence: Synthetic polypeptide
  XENP022925 [ICOS]_H0.61_L0.38_Fab-1G6_L1.194_H1.279 Light Chain

SEQ ID NO: 28495 - protein, 454 aa, Artificial Sequence; identical to SEQ ID NO: 28411
  Description of Artificial Sequence: Synthetic polypeptide
  XENP022926 [ICOS]_H0.61_L0.42_Fab-1G6_L1.194_H1.279 Fab-Fc Heavy Chain

SEQ ID NO: 28496 - protein, 480 aa, Artificial Sequence; identical to SEQ ID NO: 2930
  Description of Artificial Sequence: Synthetic polypeptide
  XENP022926 [ICOS]_H0.61_L0.42_Fab-1G6_L1.194_H1.279 scFv-Fc Heavy Chain

SEQ ID NO: 28497 - protein, 214 aa, Artificial Sequence; identical to SEQ ID NO: 28016
  Description of Artificial Sequence: Synthetic polypeptide
  XENP022926 [ICOS]_H0.61_L0.42_Fab-1G6_L1.194_H1.279 Light Chain

SEQ ID NO: 28498 - protein, 454 aa, Artificial Sequence; identical to SEQ ID NO: 28411
  Description of Artificial Sequence: Synthetic polypeptide
  XENP022927 [ICOS]_H0.61_L0.43_Fab-1G6_L1.194_H1.279 Fab-Fc Heavy Chain

SEQ ID NO: 28499 - protein, 480 aa, Artificial Sequence; identical to SEQ ID NO: 2930
  Description of Artificial Sequence: Synthetic polypeptide
  XENP022927 [ICOS]_H0.61_L0.43_Fab-1G6_L1.194_H1.279 scFv-Fc Heavy Chain

SEQ ID NO: 28500 - protein, 214 aa, Artificial Sequence; identical to SEQ ID NO: 28018
  Description of Artificial Sequence: Synthetic polypeptide
  XENP022927 [ICOS]_H0.61_L0.43_Fab-1G6_L1.194_H1.279 Light Chain

SEQ ID NO: 28501 - protein, 454 aa, Artificial Sequence; identical to SEQ ID NO: 28411
  Description of Artificial Sequence: Synthetic polypeptide
  XENP022928 [ICOS]_H0.61_L0.44_Fab-1G6_L1.194_H1.279 Fab-Fc Heavy Chain

SEQ ID NO: 28502 - protein, 480 aa, Artificial Sequence; identical to SEQ ID NO: 2930
  Description of Artificial Sequence: Synthetic polypeptide
  XENP022928 [ICOS]_H0.61_L0.44_Fab-1G6_L1.194_H1.279 scFv-Fc Heavy Chain

SEQ ID NO: 28503 - protein, 214 aa, Artificial Sequence; identical to SEQ ID NO: 28020
  Description of Artificial Sequence: Synthetic polypeptide
  XENP022928 [ICOS]_H0.61_L0.44_Fab-1G6_L1.194_H1.279 Light Chain

SEQ ID NO: 28504 - protein, 454 aa, Artificial Sequence; identical to SEQ ID NO: 26362
  Description of Artificial Sequence: Synthetic polypeptide
  XENP022935 [ICOS]_H0_L0.36_Fab-1G6_L1.194_H1.279 Fab-Fc Heavy Chain

SEQ ID NO: 28505 - protein, 480 aa, Artificial Sequence; identical to SEQ ID NO: 2930
  Description of Artificial Sequence: Synthetic polypeptide
  XENP022935 [ICOS]_H0_L0.36_Fab-1G6_L1.194_H1.279 scFv-Fc Heavy Chain

SEQ ID NO: 28506 - protein, 214 aa, Artificial Sequence; identical to SEQ ID NO: 26517
  Description of Artificial Sequence: Synthetic polypeptide
  XENP022935 [ICOS]_H0_L0.36_Fab-1G6_L1.194_H1.279 Light Chain

SEQ ID NO: 28507 - protein, 454 aa, Artificial Sequence; identical to SEQ ID NO: 28408
  Description of Artificial Sequence: Synthetic polypeptide
  XENP022936 [ICOS]_H0.35_L0.36_Fab-1G6_L1.194_H1.279 Fab-Fc Heavy Chain

SEQ ID NO: 28508 - protein, 480 aa, Artificial Sequence; identical to SEQ ID NO: 2930
  Description of Artificial Sequence: Synthetic polypeptide
  XENP022936 [ICOS]_H0.35_L0.36_Fab-1G6_L1.194_H1.279 scFv-Fc Heavy Chain

SEQ ID NO: 28509 - protein, 214 aa, Artificial Sequence; identical to SEQ ID NO: 26517
  Description of Artificial Sequence: Synthetic polypeptide
  XENP022936 [ICOS]_H0.35_L0.36_Fab-1G6_L1.194_H1.279 Light Chain

SEQ ID NO: 28510 - protein, 454 aa, Artificial Sequence; identical to SEQ ID NO: 28411
  Description of Artificial Sequence: Synthetic polypeptide
  XENP022937 [ICOS]_H0.61_L0.36_Fab-1G6_L1.194_H1.279 Fab-Fc Heavy Chain

SEQ ID NO: 28511 - protein, 480 aa, Artificial Sequence; identical to SEQ ID NO: 2930
  Description of Artificial Sequence: Synthetic polypeptide
  XENP022937 [ICOS]_H0.61_L0.36_Fab-1G6_L1.194_H1.279 scFv-Fc Heavy Chain

SEQ ID NO: 28512 - protein, 214 aa, Artificial Sequence; identical to SEQ ID NO: 26517
  Description of Artificial Sequence: Synthetic polypeptide
  XENP022937 [ICOS]_H0.61_L0.36_Fab-1G6_L1.194_H1.279 Light Chain

SEQ ID NO: 28513 - protein, 454 aa, Artificial Sequence; identical to SEQ ID NO: 26362
  Description of Artificial Sequence: Synthetic polypeptide
  XENP022974 [ICOS]_H0_L0.34_Fab-1G6_L1.194_H1.279 Fab-Fc Heavy Chain

SEQ ID NO: 28514 - protein, 480 aa, Artificial Sequence; identical to SEQ ID NO: 2930
  Description of Artificial Sequence: Synthetic polypeptide
  XENP022974 [ICOS]_H0_L0.34_Fab-1G6_L1.194_H1.279 scFv-Fc Heavy Chain

SEQ ID NO: 28515 - protein, 214 aa, Artificial Sequence; identical to SEQ ID NO: 26497
  Description of Artificial Sequence: Synthetic polypeptide
  XENP022974 [ICOS]_H0_L0.34_Fab-1G6_L1.194_H1.279 Light Chain

SEQ ID NO: 28516 - protein, 454 aa, Artificial Sequence; identical to SEQ ID NO: 28408
  Description of Artificial Sequence: Synthetic polypeptide
  XENP022975 [ICOS]_H0.35_L0.34_Fab-1G6_L1.194_H1.279 Fab-Fc Heavy Chain

SEQ ID NO: 28517 - protein, 480 aa, Artificial Sequence; identical to SEQ ID NO: 2930
  Description of Artificial Sequence: Synthetic polypeptide
  XENP022975 [ICOS]_H0.35_L0.34_Fab-1G6_L1.194_H1.279 scFv-Fc Heavy Chain

SEQ ID NO: 28518 - protein, 214 aa, Artificial Sequence; identical to SEQ ID NO: 26497
  Description of Artificial Sequence: Synthetic polypeptide
  XENP022975 [ICOS]_H0.35_L0.34_Fab-1G6_L1.194_H1.279 Light Chain

SEQ ID NO: 28519 - protein, 454 aa, Artificial Sequence; identical to SEQ ID NO: 28411
  Description of Artificial Sequence: Synthetic polypeptide
  XENP022976 [ICOS]_H0.61_L0.34_Fab-1G6_L1.194_H1.279 Fab-Fc Heavy Chain

SEQ ID NO: 28520 - protein, 480 aa, Artificial Sequence; identical to SEQ ID NO: 2930
  Description of Artificial Sequence: Synthetic polypeptide
  XENP022976 [ICOS]_H0.61_L0.34_Fab-1G6_L1.194_H1.279 scFv-Fc Heavy Chain

SEQ ID NO: 28521 - protein, 214 aa, Artificial Sequence; identical to SEQ ID NO: 26497
  Description of Artificial Sequence: Synthetic polypeptide
  XENP022976 [ICOS]_H0.61_L0.34_Fab-1G6_L1.194_H1.279 Light Chain

SEQ ID NO: 28522 - protein, 454 aa, Artificial Sequence; identical to SEQ ID NO: 26362
  Description of Artificial Sequence: Synthetic polypeptide
  XENP022977 [ICOS]_H0_L0.37_Fab-1G6_L1.194_H1.279 Fab-Fc Heavy Chain

SEQ ID NO: 28523 - protein, 480 aa, Artificial Sequence; identical to SEQ ID NO: 2930
  Description of Artificial Sequence: Synthetic polypeptide
  XENP022977 [ICOS]_H0_L0.37_Fab-1G6_L1.194_H1.279 scFv-Fc Heavy Chain

SEQ ID NO: 28524 - protein, 214 aa, Artificial Sequence; identical to SEQ ID NO: 26537
  Description of Artificial Sequence: Synthetic polypeptide
  XENP022977 [ICOS]_H0_L0.37_Fab-1G6_L1.194_H1.279 Light Chain

SEQ ID NO: 28525 - protein, 454 aa, Artificial Sequence; identical to SEQ ID NO: 28408
  Description of Artificial Sequence: Synthetic polypeptide
  XENP022978 [ICOS]_H0.35_L0.37_Fab-1G6_L1.194_H1.279 Fab-Fc Heavy Chain

SEQ ID NO: 28526 - protein, 480 aa, Artificial Sequence; identical to SEQ ID NO: 2930
  Description of Artificial Sequence: Synthetic polypeptide
  XENP022978 [ICOS]_H0.35_L0.37_Fab-1G6_L1.194_H1.279 scFv-Fc Heavy Chain

SEQ ID NO: 28527 - protein, 214 aa, Artificial Sequence; identical to SEQ ID NO: 26537
  Description of Artificial Sequence: Synthetic polypeptide
  XENP022978 [ICOS]_H0.35_L0.37_Fab-1G6_L1.194_H1.279 Light Chain

SEQ ID NO: 28528 - protein, 454 aa, Artificial Sequence; identical to SEQ ID NO: 28411
  Description of Artificial Sequence: Synthetic polypeptide
  XENP022979 [ICOS]_H0.61_L0.37_Fab-1G6_L1.194_H1.279 Fab-Fc Heavy Chain

SEQ ID NO: 28529 - protein, 480 aa, Artificial Sequence; identical to SEQ ID NO: 2930
  Description of Artificial Sequence: Synthetic polypeptide
  XENP022979 [ICOS]_H0.61_L0.37_Fab-1G6_L1.194_H1.279 scFv-Fc Heavy Chain

SEQ ID NO: 28530 - protein, 214 aa, Artificial Sequence; identical to SEQ ID NO: 26537
  Description of Artificial Sequence: Synthetic polypeptide
  XENP022979 [ICOS]_H0.61_L0.37_Fab-1G6_L1.194_H1.279 Light Chain

SEQ ID NO: 28531 - protein, 454 aa, Artificial Sequence; identical to SEQ ID NO: 26362
  Description of Artificial Sequence: Synthetic polypeptide
  XENP022995 [ICOS]_H0_L0.35_Fab-1G6_L1.194_H1.279 Fab-Fc Heavy Chain

SEQ ID NO: 28532 - protein, 480 aa, Artificial Sequence; identical to SEQ ID NO: 2930
  Description of Artificial Sequence: Synthetic polypeptide
  XENP022995 [ICOS]_H0_L0.35_Fab-1G6_L1.194_H1.279 scFv-Fc Heavy Chain

SEQ ID NO: 28533 - protein, 214 aa, Artificial Sequence; identical to SEQ ID NO: 28008
  Description of Artificial Sequence: Synthetic polypeptide
  XENP022995 [ICOS]_H0_L0.35_Fab-1G6_L1.194_H1.279 Light Chain

SEQ ID NO: 28534 - protein, 454 aa, Artificial Sequence; identical to SEQ ID NO: 28408
  Description of Artificial Sequence: Synthetic polypeptide
  XENP022996 [ICOS]_H0.35_L0.35_Fab-1G6_L1.194_H1.279 Fab-Fc Heavy Chain

SEQ ID NO: 28535 - protein, 480 aa, Artificial Sequence; identical to SEQ ID NO: 2930
  Description of Artificial Sequence: Synthetic polypeptide
  XENP022996 [ICOS]_H0.35_L0.35_Fab-1G6_L1.194_H1.279 scFv-Fc Heavy Chain

SEQ ID NO: 28536 - protein, 214 aa, Artificial Sequence; identical to SEQ ID NO: 28008
  Description of Artificial Sequence: Synthetic polypeptide
  XENP022996 [ICOS]_H0.35_L0.35_Fab-1G6_L1.194_H1.279 Light Chain

SEQ ID NO: 28537 - protein, 454 aa, Artificial Sequence; identical to SEQ ID NO: 28411
  Description of Artificial Sequence: Synthetic polypeptide
  XENP023001 [ICOS]_H0.61_L0.35_Fab-1G6_L1.194_H1.279 Fab-Fc Heavy Chain

SEQ ID NO: 28538 - protein, 480 aa, Artificial Sequence; identical to SEQ ID NO: 2930
  Description of Artificial Sequence: Synthetic polypeptide
  XENP023001 [ICOS]_H0.61_L0.35_Fab-1G6_L1.194_H1.279 scFv-Fc Heavy Chain

SEQ ID NO: 28539 - protein, 214 aa, Artificial Sequence; identical to SEQ ID NO: 28008
  Description of Artificial Sequence: Synthetic polypeptide
  XENP023001 [ICOS]_H0.61_L0.35_Fab-1G6_L1.194_H1.279 Light Chain

SEQ ID NO: 28540 - protein, 454 aa, Artificial Sequence
  Description of Artificial Sequence: Synthetic polypeptide
  XENP023103 [ICOS]_H0.37_L0_Fab-1G6_L1.194_H1.279 Fab-Fc Heavy Chain
QVQLVQSGAEVKKPGASVKVSCKASGYTFTGYYMHWVRQAPGQGLEWMGWINPHSGGTNYAQKFQGRVTMTRDTSISTAYMELSSLRSEDTAVYYCARTYYYDTSGYYHDAFDVWGQGTMVTVSSASTKGPSVFPLAPSSKSTSGGTAALGCLVKDYFPEPVTVSWNSGALTSGVHTFPAVLQSSGLYSLSSVVTVPSSSLGTQTYICNVNHKPSDTKVDKKVEPKSCDKTHTCPPCPAPPVAGPSVFLFPPKPKDTLMISRTPEVTCVVVDVKHEDPEVKFNWYVDGVEVHNAKTKPREEEYNSTYRVVSVLTVLHQDWLNGKEYKCKVSNKALPAPIEKTISKAKGQPREPQVYTLPPSREEMTKNQVSLTCDVSGFYPSDIAVEWESDGQPENNYKTTPPVLDSDGSFFLYSKLTVDKSRWEQGDVFSCSVLHEALHSHYTQKSLSLSPGK

SEQ ID NO: 28541 - protein, 480 aa, Artificial Sequence; identical to SEQ ID NO: 2930
  Description of Artificial Sequence: Synthetic polypeptide
  XENP023103 [ICOS]_H0.37_L0_Fab-1G6_L1.194_H1.279 scFv-Fc Heavy Chain

SEQ ID NO: 28542 - protein, 214 aa, Artificial Sequence; identical to SEQ ID NO: 26297
  Description of Artificial Sequence: Synthetic polypeptide
  XENP023103 [ICOS]_H0.37_L0_Fab-1G6_L1.194_H1.279 Light Chain

SEQ ID NO: 28543 - protein, 454 aa, Artificial Sequence; identical to SEQ ID NO: 26642
  Description of Artificial Sequence: Synthetic polypeptide
  XENP023104 [ICOS]_H0.66_L0_Fab-1G6_L1.194_H1.279 Fab-Fc Heavy Chain

SEQ ID NO: 28544 - protein, 480 aa, Artificial Sequence; identical to SEQ ID NO: 2930
  Description of Artificial Sequence: Synthetic polypeptide
  XENP023104 [ICOS]_H0.66_L0_Fab-1G6_L1.194_H1.279 scFv-Fc Heavy Chain

SEQ ID NO: 28545 - protein, 214 aa, Artificial Sequence; identical to SEQ ID NO: 26297
  Description of Artificial Sequence: Synthetic polypeptide
  XENP023104 [ICOS]_H0.66_L0_Fab-1G6_L1.194_H1.279 Light Chain

SEQ ID NO: 28546 - protein, 454 aa, Artificial Sequence; identical to SEQ ID NO: 26642
  Description of Artificial Sequence: Synthetic polypeptide
  XENP023411 [ICOS]_H0.66_L0.34_Fab-1G6_L1.194_H1.279 Fab-Fc Heavy Chain

SEQ ID NO: 28547 - protein, 480 aa, Artificial Sequence; identical to SEQ ID NO: 2930
  Description of Artificial Sequence: Synthetic polypeptide
  XENP023411 [ICOS]_H0.66_L0.34_Fab-1G6_L1.194_H1.279 scFv-Fc Heavy Chain

SEQ ID NO: 28548 - protein, 214 aa, Artificial Sequence; identical to SEQ ID NO: 26497
  Description of Artificial Sequence: Synthetic polypeptide
  XENP023411 [ICOS]_H0.66_L0.34_Fab-1G6_L1.194_H1.279 Light Chain

SEQ ID NO: 28549 - protein, 449 aa, Artificial Sequence
  Description of Artificial Sequence: Synthetic polypeptide
  XENP015074 Numax FcKO mAb Heavy Chain
QVTLRESGPALVKPTQTLTLTCTFSGFSLSTAGMSVGWIRQPPGKALEWLADIWWDDKKHYNPSLKDRLTISKDTSKNQVVLKVTNMDPADTATYYCARDMIFNFYFDVWGQGTTVTVSSASTKGPSVFPLAPSSKSTSGGTAALGCLVKDYFPEPVTVSWNSGALTSGVHTFPAVLQSSGLYSLSSVVTVPSSSLGTQTYICNVNHKPSNTKVDKKVEPKSCDKTHTCPPCPAPPVAGPSVFLFPPKPKDTLMISRTPEVTCVVVDVKHEDPEVKFNWYVDGVEVHNAKTKPREEQYNSTYRVVSVLTVLHQDWLNGKEYKCKVSNKALPAPIEKTISKAKGQPREPQVYTLPPSREEMTKNQVSLTCLVKGFYPSDIAVEWESNGQPENNYKTTPPVLDSDGSFFLYSKLTVDKSRWQQGNVFSCSVMHEALHNHYTQKSLSLSPGK

SEQ ID NO: 28550 - protein, 213 aa, Artificial Sequence
  Description of Artificial Sequence: Synthetic polypeptide
  XENP015074 Numax FcKO mAb Light Chain
DIQMTQSPSTLSASVGDRVTITCSASSRVGYMHWYQQKPGKAPKLLIYDTSKLASGVPSRFSGSGSGTEFTLTISSLQPDDFATYYCFQGSGYPFTFGGGTKVEIKRTVAAPSVFIFPPSDEQLKSGTASVVCLLNNFYPREAKVQWKVDNALQSGNSQESVTEQDSKDSTYSLSSTLTLSKADYEKHKVYACEVTHQGLSSPVTKSFNRGEC

SEQ ID NO: 28551 - protein, 442 aa, Artificial Sequence; identical to SEQ ID NO: 16161
  Description of Artificial Sequence: Synthetic polypeptide
  XENP016432 nivolumab_H0L0 FcKO mAb Heavy Chain

SEQ ID NO: 28552 - protein, 214 aa, Artificial Sequence; identical to SEQ ID NO: 16146
  Description of Artificial Sequence: Synthetic polypeptide
  XENP016432 nivolumab_H0L0 FcKO mAb Light Chain

SEQ ID NO: 28553 - protein, 454 aa, Artificial Sequence; identical to SEQ ID NO: 26292
  Description of Artificial Sequence: Synthetic polypeptide
  XENP016435 [ICOS]_H0L0 FcKO mAb Heavy Chain

SEQ ID NO: 28554 - protein, 214 aa, Artificial Sequence; identical to SEQ ID NO: 26297
  Description of Artificial Sequence: Synthetic polypeptide
  XENP016435 [ICOS]_H0L0 FcKO mAb Light Chain

SEQ ID NO: 28555 - protein, 231 aa, Artificial Sequence; identical to SEQ ID NO: 2393
  Description of Artificial Sequence: Synthetic polypeptide
  XENP020111 1G6_L1.194_H1.279 one-arm mAb Fc-only Heavy Chain

SEQ ID NO: 28556 - protein, 480 aa, Artificial Sequence; identical to SEQ ID NO: 2870
  Description of Artificial Sequence: Synthetic polypeptide
  XENP020111 1G6_L1.194_H1.279 one-arm mAb scFv-Fc Heavy Chain

SEQ ID NO: 28557 - protein, 252 aa, Artificial Sequence
  Description of Artificial Sequence: Synthetic polypeptide
  XENPA1 (XENP022050 [ICOS]_H0L0 scFv)
QVQLVQSGAEVKKPGASVKVSCKASGYTFTGYYMHWVRQAPGQGLEWMGWINPHSGGTNYAQKFQGRVTMTRDTSISTAYMELSRLRSDDTAVYYCARTYYYDSSGYYHDAFDIWGQGTMVTVSSGKPGSGKPGSGKPGSGKPGSDIQMTQSPSSVSASVGDRVTITCRASQGISRLLAWYQQKPGKAPKLLIYVASSLQSGVPSRFSGSGSGTDFTLTISSLQPEDFATYYCQQANSFPWTFGQGTKVEIK

SEQ ID NO: 28558 - protein, 252 aa, Artificial Sequence
  Description of Artificial Sequence: Synthetic polypeptide
  XENPA2 (XENP022051 [ICOS]_H0.1_L0 scFv)
QVQLVQSGAEVKKPGASVKVSCKASGYTFTEYYMHWVRQAPGQGLEWMGWINPHSGGTNYAQKFQGRVTMTRDTSISTAYMELSRLRSDDTAVYYCARTYYYDSSGYYHDAFDIWGQGTMVTVSSGKPGSGKPGSGKPGSGKPGSDIQMTQSPSSVSASVGDRVTITCRASQGISRLLAWYQQKPGKAPKLLIYVASSLQSGVPSRFSGSGSGTDFTLTISSLQPEDFATYYCQQANSFPWTFGQGTKVEIK

SEQ ID NO: 28559 - protein, 252 aa, Artificial Sequence
  Description of Artificial Sequence: Synthetic polypeptide
  XENPA3 (XENP022052 [ICOS]_H0.2_L0 scFv)
QVQLVQSGAEVKKPGASVKVSCKASGYTFTSYYMHWVRQAPGQGLEWMGWINPHSGGTNYAQKFQGRVTMTRDTSISTAYMELSRLRSDDTAVYYCARTYYYDSSGYYHDAFDIWGQGTMVTVSSGKPGSGKPGSGKPGSGKPGSDIQMTQSPSSVSASVGDRVTITCRASQGISRLLAWYQQKPGKAPKLLIYVASSLQSGVPSRFSGSGSGTDFTLTISSLQPEDFATYYCQQANSFPWTFGQGTKVEIK

SEQ ID NO: 28560 - protein, 252 aa, Artificial Sequence
  Description of Artificial Sequence: Synthetic polypeptide
  XENPA4 (XENP022053 [ICOS]_H0.3_L0 scFv)
QVQLVQSGAEVKKPGASVKVSCKASGYTFTGYYMHWVRQAPGQGLEWMGIINPHSGGTNYAQKFQGRVTMTRDTSISTAYMELSRLRSDDTAVYYCARTYYYDSSGYYHDAFDIWGQGTMVTVSSGKPGSGKPGSGKPGSGKPGSDIQMTQSPSSVSASVGDRVTITCRASQGISRLLAWYQQKPGKAPKLLIYVASSLQSGVPSRFSGSGSGTDFTLTISSLQPEDFATYYCQQANSFPWTFGQGTKVEIK

SEQ ID NO: 28561 - protein, 252 aa, Artificial Sequence
  Description of Artificial Sequence: Synthetic polypeptide
  XENPA5 (XENP022054 [ICOS]_H0.4_L0 scFv)
QVQLVQSGAEVKKPGASVKVSCKASGYTFTGYYMHWVRQAPGQGLEWMGWINPESGGTNYAQKFQGRVTMTRDTSISTAYMELSRLRSDDTAVYYCARTYYYDSSGYYHDAFDIWGQGTMVTVSSGKPGSGKPGSGKPGSGKPGSDIQMTQSPSSVSASVGDRVTITCRASQGISRLLAWYQQKPGKAPKLLIYVASSLQSGVPSRFSGSGSGTDFTLTISSLQPEDFATYYCQQANSFPWTFGQGTKVEIK

SEQ ID NO: 28562 - protein, 252 aa, Artificial Sequence
  Description of Artificial Sequence: Synthetic polypeptide
  XENPA6 (XENP022055 [ICOS]_H0.5_L0 scFv)
QVQLVQSGAEVKKPGASVKVSCKASGYTFTGYYMHWVRQAPGQGLEWMGWINPSSGGTNYAQKFQGRVTMTRDTSISTAYMELSRLRSDDTAVYYCARTYYYDSSGYYHDAFDIWGQGTMVTVSSGKPGSGKPGSGKPGSGKPGSDIQMTQSPSSVSASVGDRVTITCRASQGISRLLAWYQQKPGKAPKLLIYVASSLQSGVPSRFSGSGSGTDFTLTISSLQPEDFATYYCQQANSFPWTFGQGTKVEIK

SEQ ID NO: 28563 - protein, 252 aa, Artificial Sequence
  Description of Artificial Sequence: Synthetic polypeptide
  XENPA7 (XENP022056 [ICOS]_H0.6_L0 scFv)
QVQLVQSGAEVKKPGASVKVSCKASGYTFTGYYMHWVRQAPGQGLEWMGWINPHGGGTNYAQKFQGRVTMTRDTSISTAYMELSRLRSDDTAVYYCARTYYYDSSGYYHDAFDIWGQGTMVTVSSGKPGSGKPGSGKPGSGKPGSDIQMTQSPSSVSASVGDRVTITCRASQGISRLLAWYQQKPGKAPKLLIYVASSLQSGVPSRFSGSGSGTDFTLTISSLQPEDFATYYCQQANSFPWTFGQGTKVEIK

SEQ ID NO: 28564 - protein, 252 aa, Artificial Sequence
  Description of Artificial Sequence: Synthetic polypeptide
  XENPA8 (XENP022057 [ICOS]_H0.7_L0 scFv)
QVQLVQSGAEVKKPGASVKVSCKASGYTFTGYYMHWVRQAPGQGLEWMGWINPHSGETNYAQKFQGRVTMTRDTSISTAYMELSRLRSDDTAVYYCARTYYYDSSGYYHDAFDIWGQGTMVTVSSGKPGSGKPGSGKPGSGKPGSDIQMTQSPSSVSASVGDRVTITCRASQGISRLLAWYQQKPGKAPKLLIYVASSLQSGVPSRFSGSGSGTDFTLTISSLQPEDFATYYCQQANSFPWTFGQGTKVEIK

SEQ ID NO: 28565 - protein, 252 aa, Artificial Sequence
  Description of Artificial Sequence: Synthetic polypeptide
  XENPA9 (XENP022058 [ICOS]_H0.8_L0 scFv)
QVQLVQSGAEVKKPGASVKVSCKASGYTFTGYYMHWVRQAPGQGLEWMGWINPHSGGTSYAQKFQGRVTMTRDTSISTAYMELSRLRSDDTAVYYCARTYYYDSSGYYHDAFDIWGQGTMVTVSSGKPGSGKPGSGKPGSGKPGSDIQMTQSPSSVSASVGDRVTITCRASQGISRLLAWYQQKPGKAPKLLIYVASSLQSGVPSRFSGSGSGTDFTLTISSLQPEDFATYYCQQANSFPWTFGQGTKVEIK

SEQ ID NO: 28566 - protein, 251 aa, Artificial Sequence
  Description of Artificial Sequence: Synthetic polypeptide
  XENPA10 (XENP022059 [ICOS]_H0.9_L0 scFv)
QVQLVQSGAEVKKPGASVKVSCKASGYTFTGYYMHWVRQAPGQGLEWMGWINPHSGGTNYAEKFQGRVTMTRDTSISTAYMELSRLRSDDTAVYYCARTYYYDSSGYYHDAFDIWGQGTMVTVSSGKPGSGKPGSGKPGSGKPGSIQMTQSPSSVSASVGDRVTITCRASQGISRLLAWYQQKPGKAPKLLIYVASSLQSGVPSRFSGSGSGTDFTLTISSLQPEDFATYYCQQANSFPWTFGQGTKVEIK

SEQ ID NO: 28567 - protein, 252 aa, Artificial Sequence
  Description of Artificial Sequence: Synthetic polypeptide
  XENPA11 (XENP022060 [ICOS]_H0.10_L0 scFv)
QVQLVQSGAEVKKPGASVKVSCKASGYTFTGYYMHWVRQAPGQGLEWMGWINPHSGGTNYAQKFQERVTMTRDTSISTAYMELSRLRSDDTAVYYCARTYYYDSSGYYHDAFDIWGQGTMVTVSSGKPGSGKPGSGKPGSGKPGSDIQMTQSPSSVSASVGDRVTITCRASQGISRLLAWYQQKPGKAPKLLIYVASSLQSGVPSRFSGSGSGTDFTLTISSLQPEDFATYYCQQANSFPWTFGQGTKVEIK

SEQ ID NO: 28568 - protein, 252 aa, Artificial Sequence
  Description of Artificial Sequence: Synthetic polypeptide
  XENPA12 (XENP022061 [ICOS]_H0.11_L0 scFv)
QVQLVQSGAEVKKPGASVKVSCKASGYTFTGYYMHWVRQAPGQGLEWMGWINPHSGGTNYAQKFQGRVTITRDTSISTAYMELSRLRSDDTAVYYCARTYYYDSSGYYHDAFDIWGQGTMVTVSSGKPGSGKPGSGKPGSGKPGSDIQMTQSPSSVSASVGDRVTITCRASQGISRLLAWYQQKPGKAPKLLIYVASSLQSGVPSRFSGSGSGTDFTLTISSLQPEDFATYYCQQANSFPWTFGQGTKVEIK

SEQ ID NO: 28569 - protein, 252 aa, Artificial Sequence
  Description of Artificial Sequence: Synthetic polypeptide
  XENPA13 (XENP022062 [ICOS]_H0.12_L0 scFv)
QVQLVQSGAEVKKPGASVKVSCKASGYTFTGYYMHWVRQAPGQGLEWMGWINPHSGGTNYAQKFQGRVTMTADTSISTAYMELSRLRSDDTAVYYCARTYYYDSSGYYHDAFDIWGQGTMVTVSSGKPGSGKPGSGKPGSGKPGSDIQMTQSPSSVSASVGDRVTITCRASQGISRLLAWYQQKPGKAPKLLIYVASSLQSGVPSRFSGSGSGTDFTLTISSLQPEDFATYYCQQANSFPWTFGQGTKVEIK

SEQ ID NO: 28570 - protein, 252 aa, Artificial Sequence
  Description of Artificial Sequence: Synthetic polypeptide
  XENPA14 (XENP022063 [ICOS]_H0.13_L0 scFv)
QVQLVQSGAEVKKPGASVKVSCKASGYTFTGYYMHWVRQAPGQGLEWMGWINPHSGGTNYAQKFQGRVTMTEDTSISTAYMELSRLRSDDTAVYYCARTYYYDSSGYYHDAFDIWGQGTMVTVSSGKPGSGKPGSGKPGSGKPGSDIQMTQSPSSVSASVGDRVTITCRASQGISRLLAWYQQKPGKAPKLLIYVASSLQSGVPSRFSGSGSGTDFTLTISSLQPEDFATYYCQQANSFPWTFGQGTKVEIK

SEQ ID NO: 28571 - protein, 252 aa, Artificial Sequence
  Description of Artificial Sequence: Synthetic polypeptide
  XENPA15 (XENP022064 [ICOS]_H0.14_L0 scFv)
QVQLVQSGAEVKKPGASVKVSCKASGYTFTGYYMHWVRQAPGQGLEWMGWINPHSGGTNYAQKFQGRVTMTTDTSISTAYMELSRLRSDDTAVYYCARTYYYDSSGYYHDAFDIWGQGTMVTVSSGKPGSGKPGSGKPGSGKPGSDIQMTQSPSSVSASVGDRVTITCRASQGISRLLAWYQQKPGKAPKLLIYVASSLQSGVPSRFSGSGSGTDFTLTISSLQPEDFATYYCQQANSFPWTFGQGTKVEIK

SEQ ID NO: 28572 - protein, 252 aa, Artificial Sequence
  Description of Artificial Sequence: Synthetic polypeptide
  XENPA16 (XENP022065 [ICOS]_H0.15_L0 scFv)
QVQLVQSGAEVKKPGASVKVSCKASGYTFTGYYMHWVRQAPGQGLEWMGWINPHSGGTNYAQKFQGRVTMTRDESISTAYMELSRLRSDDTAVYYCARTYYYDSSGYYHDAFDIWGQGTMVTVSSGKPGSGKPGSGKPGSGKPGSDIQMTQSPSSVSASVGDRVTITCRASQGISRLLAWYQQKPGKAPKLLIYVASSLQSGVPSRFSGSGSGTDFTLTISSLQPEDFATYYCQQANSFPWTFGQGTKVEIK

SEQ ID NO: 28573 - protein, 252 aa, Artificial Sequence
  Description of Artificial Sequence: Synthetic polypeptide
  XENPA17 (XENP022066 [ICOS]_H0.16_L0 scFv)
QVQLVQSGAEVKKPGASVKVSCKASGYTFTGYYMHWVRQAPGQGLEWMGWINPHSGGTNYAQKFQGRVTMTRDTSTSTAYMELSRLRSDDTAVYYCARTYYYDSSGYYHDAFDIWGQGTMVTVSSGKPGSGKPGSGKPGSGKPGSDIQMTQSPSSVSASVGDRVTITCRASQGISRLLAWYQQKPGKAPKLLIYVASSLQSGVPSRFSGSGSGTDFTLTISSLQPEDFATYYCQQANSFPWTFGQGTKVEIK

SEQ ID NO: 28574 - protein, 252 aa, Artificial Sequence
  Description of Artificial Sequence: Synthetic polypeptide
  XENPA18 (XENP022067 [ICOS]_H0.17_L0 scFv)
QVQLVQSGAEVKKPGASVKVSCKASGYTFTGYYMHWVRQAPGQGLEWMGWINPHSGGTNYAQKFQGRVTMTRDTSISTAYMELSSLRSDDTAVYYCARTYYYDSSGYYHDAFDIWGQGTMVTVSSGKPGSGKPGSGKPGSGKPGSDIQMTQSPSSVSASVGDRVTITCRASQGISRLLAWYQQKPGKAPKLLIYVASSLQSGVPSRFSGSGSGTDFTLTISSLQPEDFATYYCQQANSFPWTFGQGTKVEIK

SEQ ID NO: 28575 - protein, 252 aa, Artificial Sequence
  Description of Artificial Sequence: Synthetic polypeptide
  XENPA19 (XENP022068 [ICOS]_H0.18_L0 scFv)
QVQLVQSGAEVKKPGASVKVSCKASGYTFTGYYMHWVRQAPGQGLEWMGWINPHSGGTNYAQKFQGRVTMTRDTSISTAYMELSRLRSEDTAVYYCARTYYYDSSGYYHDAFDIWGQGTMVTVSSGKPGSGKPGSGKPGSGKPGSDIQMTQSPSSVSASVGDRVTITCRASQGISRLLAWYQQKPGKAPKLLIYVASSLQSGVPSRFSGSGSGTDFTLTISSLQPEDFATYYCQQANSFPWTFGQGTKVEIK

SEQ ID NO: 28576 - protein, 252 aa, Artificial Sequence
  Description of Artificial Sequence: Synthetic polypeptide
  XENPA20 (XENP022069 [ICOS]_H0.19_L0 scFv)
QVQLVQSGAEVKKPGASVKVSCKASGYTFTGYYMHWVRQAPGQGLEWMGWINPHSGGTNYAQKFQGRVTMTRDTSISTAYMELSRLRSDDTAVYYCARTYYYASSGYYHDAFDIWGQGTMVTVSSGKPGSGKPGSGKPGSGKPGSDIQMTQSPSSVSASVGDRVTITCRASQGISRLLAWYQQKPGKAPKLLIYVASSLQSGVPSRFSGSGSGTDFTLTISSLQPEDFATYYCQQANSFPWTFGQGTKVEIK

SEQ ID NO: 28577 - protein, 252 aa, Artificial Sequence
  Description of Artificial Sequence: Synthetic polypeptide
  XENPA21 (XENP022070 [ICOS]_H0.20_L0 scFv)
QVQLVQSGAEVKKPGASVKVSCKASGYTFTGYYMHWVRQAPGQGLEWMGWINPHSGGTNYAQKFQGRVTMTRDTSISTAYMELSRLRSDDTAVYYCARTYYYESSGYYHDAFDIWGQGTMVTVSSGKPGSGKPGSGKPGSGKPGSDIQMTQSPSSVSASVGDRVTITCRASQGISRLLAWYQQKPGKAPKLLIYVASSLQSGVPSRFSGSGSGTDFTLTISSLQPEDFATYYCQQANSFPWTFGQGTKVEIK

SEQ ID NO: 28578 - protein, 252 aa, Artificial Sequence
  Description of Artificial Sequence: Synthetic polypeptide
  XENPA22 (XENP022071 [ICOS]_H0.21_L0 scFv)
QVQLVQSGAEVKKPGASVKVSCKASGYTFTGYYMHWVRQAPGQGLEWMGWINPHSGGTNYAQKFQGRVTMTRDTSISTAYMELSRLRSDDTAVYYCARTYYYQSSGYYHDAFDIWGQGTMVTVSSGKPGSGKPGSGKPGSGKPGSDIQMTQSPSSVSASVGDRVTITCRASQGISRLLAWYQQKPGKAPKLLIYVASSLQSGVPSRFSGSGSGTDFTLTISSLQPEDFATYYCQQANSFPWTFGQGTKVEIK

SEQ ID NO: 28579 - protein, 252 aa, Artificial Sequence
  Description of Artificial Sequence: Synthetic polypeptide
  XENPA23 (XENP022072 [ICOS]_H0.22_L0 scFv)
QVQLVQSGAEVKKPGASVKVSCKASGYTFTGYYMHWVRQAPGQGLEWMGWINPHSGGTNYAQKFQGRVTMTRDTSISTAYMELSRLRSDDTAVYYCARTYYYSSSGYYHDAFDIWGQGTMVTVSSGKPGSGKPGSGKPGSGKPGSDIQMTQSPSSVSASVGDRVTITCRASQGISRLLAWYQQKPGKAPKLLIYVASSLQSGVPSRFSGSGSGTDFTLTISSLQPEDFATYYCQQANSFPWTFGQGTKVEIK

SEQ ID NO: 28580 - protein, 252 aa, Artificial Sequence
  Description of Artificial Sequence: Synthetic polypeptide
  XENPA24 (XENP022073 [ICOS]_H0.23_L0 scFv)
QVQLVQSGAEVKKPGASVKVSCKASGYTFTGYYMHWVRQAPGQGLEWMGWINPHSGGTNYAQKFQGRVTMTRDTSISTAYMELSRLRSDDTAVYYCARTYYYTSSGYYHDAFDIWGQGTMVTVSSGKPGSGKPGSGKPGSGKPGSDIQMTQSPSSVSASVGDRVTITCRASQGISRLLAWYQQKPGKAPKLLIYVASSLQSGVPSRFSGSGSGTDFTLTISSLQPEDFATYYCQQANSFPWTFGQGTKVEIK

SEQ ID NO: 28581 - protein, 252 aa, Artificial Sequence
  Description of Artificial Sequence: Synthetic polypeptide
  XENPA25 (XENP022074 [ICOS]_H0.24_L0 scFv)
QVQLVQSGAEVKKPGASVKVSCKASGYTFTGYYMHWVRQAPGQGLEWMGWINPHSGGTNYAQKFQGRVTMTRDTSISTAYMELSRLRSDDTAVYYCARTYYYDTSGYYHDAFDIWGQGTMVTVSSGKPGSGKPGSGKPGSGKPGSDIQMTQSPSSVSASVGDRVTITCRASQGISRLLAWYQQKPGKAPKLLIYVASSLQSGVPSRFSGSGSGTDFTLTISSLQPEDFATYYCQQANSFPWTFGQGTKVEIK

SEQ ID NO: 28582 - protein, 252 aa, Artificial Sequence
  Description of Artificial Sequence: Synthetic polypeptide
  XENPA26 (XENP022075 [ICOS]_H0.25_L0 scFv)
QVQLVQSGAEVKKPGASVKVSCKASGYTFTGYYMHWVRQAPGQGLEWMGWINPHSGGTNYAQKFQGRVTMTRDTSISTAYMELSRLRSDDTAVYYCARTYYYDSSGYYEDAFDIWGQGTMVTVSSGKPGSGKPGSGKPGSGKPGSDIQMTQSPSSVSASVGDRVTITCRASQGISRLLAWYQQKPGKAPKLLIYVASSLQSGVPSRFSGSGSGTDFTLTISSLQPEDFATYYCQQANSFPWTFGQGTKVEIK

SEQ ID NO: 28583 - protein, 252 aa, Artificial Sequence
  Description of Artificial Sequence: Synthetic polypeptide
  XENPA27 (XENP022076 [ICOS]_H0.26_L0 scFv)
QVQLVQSGAEVKKPGASVKVSCKASGYTFTGYYMHWVRQAPGQGLEWMGWINPHSGGTNYAQKFQGRVTMTRDTSISTAYMELSRLRSDDTAVYYCARTYYYDSSGYYQDAFDIWGQGTMVTVSSGKPGSGKPGSGKPGSGKPGSDIQMTQSPSSVSASVGDRVTITCRASQGISRLLAWYQQKPGKAPKLLIYVASSLQSGVPSRFSGSGSGTDFTLTISSLQPEDFATYYCQQANSFPWTFGQGTKVEIK

SEQ ID NO: 28584 - protein, 252 aa, Artificial Sequence
  Description of Artificial Sequence: Synthetic polypeptide
  XENPA28 (XENP022077 [ICOS]_H0.27_L0 scFv)
QVQLVQSGAEVKKPGASVKVSCKASGYTFTGYYMHWVRQAPGQGLEWMGWINPHSGGTNYAQKFQGRVTMTRDTSISTAYMELSRLRSDDTAVYYCARTYYYDSSGYYSDAFDIWGQGTMVTVSSGKPGSGKPGSGKPGSGKPGSDIQMTQSPSSVSASVGDRVTITCRASQGISRLLAWYQQKPGKAPKLLIYVASSLQSGVPSRFSGSGSGTDFTLTISSLQPEDFATYYCQQANSFPWTFGQGTKVEIK

SEQ ID NO: 28585 - protein, 251 aa, Artificial Sequence
  Description of Artificial Sequence: Synthetic polypeptide
  XENPA29 (XENP022078 [ICOS]_H0.28_L0 scFv)
QVQLVQSAEVKKPGASVKVSCKASGYTFTGYYMHWVRQAPGQGLEWMGWINPHSGGTNYAQKFQGRVTMTRDTSISTAYMELSRLRSDDTAVYYCARTYYYDSSGYYYDAFDIWGQGTMVTVSSGKPGSGKPGSGKPGSGKPGSDIQMTQSPSSVSASVGDRVTITCRASQGISRLLAWYQQKPGKAPKLLIYVASSLQSGVPSRFSGSGSGTDFTLTISSLQPEDFATYYCQQANSFPWTFGQGTKVEIK

SEQ ID NO: 28586 - protein, 252 aa, Artificial Sequence
  Description of Artificial Sequence: Synthetic polypeptide
  XENPA30 (XENP022079 [ICOS]_H0.29_L0 scFv)
QVQLVQSGAEVKKPGASVKVSCKASGYTFTGYYMHWVRQAPGQGLEWMGWINPHSGGTNYAQKFQGRVTMTRDTSISTAYMELSRLRSDDTAVYYCARTYYYDSSGYYHAAFDIWGQGTMVTVSSGKPGSGKPGSGKPGSGKPGSDIQMTQSPSSVSASVGDRVTITCRASQGISRLLAWYQQKPGKAPKLLIYVASSLQSGVPSRFSGSGSGTDFTLTISSLQPEDFATYYCQQANSFPWTFGQGTKVEIK

SEQ ID NO: 28587 - protein, 252 aa, Artificial Sequence
  Description of Artificial Sequence: Synthetic polypeptide
  XENPA31 (XENP022080 [ICOS]_H0.30_L0 scFv)
QVQLVQSGAEVKKPGASVKVSCKASGYTFTGYYMHWVRQAPGQGLEWMGWINPHSGGTNYAQKFQGRVTMTRDTSISTAYMELSRLRSDDTAVYYCARTYYYDSSGYYHEAFDIWGQGTMVTVSSGKPGSGKPGSGKPGSGKPGSDIQMTQSPSSVSASVGDRVTITCRASQGISRLLAWYQQKPGKAPKLLIYVASSLQSGVPSRFSGSGSGTDFTLTISSLQPEDFATYYCQQANSFPWTFGQGTKVEIK

SEQ ID NO: 28588 - protein, 252 aa, Artificial Sequence
  Description of Artificial Sequence: Synthetic polypeptide
  XENPA32 (XENP022081 [ICOS]_H0.31_L0 scFv)
QVQLVQSGAEVKKPGASVKVSCKASGYTFTGYYMHWVRQAPGQGLEWMGWINPHSGGTNYAQKFQGRVTMTRDTSISTAYMELSRLRSDDTAVYYCARTYYYDSSGYYHQAFDIWGQGTMVTVSSGKPGSGKPGSGKPGSGKPGSDIQMTQSPSSVSASVGDRVTITCRASQGISRLLAWYQQKPGKAPKLLIYVASSLQSGVPSRFSGSGSGTDFTLTISSLQPEDFATYYCQQANSFPWTFGQGTKVEIK

SEQ ID NO: 28589 - protein, 252 aa, Artificial Sequence
  Description of Artificial Sequence: Synthetic polypeptide
  XENPA33 (XENP022082 [ICOS]_H0.32_L0 scFv)
QVQLVQSGAEVKKPGASVKVSCKASGYTFTGYYMHWVRQAPGQGLEWMGWINPHSGGTNYAQKFQGRVTMTRDTSISTAYMELSRLRSDDTAVYYCARTYYYDSSGYYHSAFDIWGQGTMVTVSSGKPGSGKPGSGKPGSGKPGSDIQMTQSPSSVSASVGDRVTITCRASQGISRLLAWYQQKPGKAPKLLIYVASSLQSGVPSRFSGSGSGTDFTLTISSLQPEDFATYYCQQANSFPWTFGQGTKVEIK

SEQ ID NO: 28590 - protein, 252 aa, Artificial Sequence
  Description of Artificial Sequence: Synthetic polypeptide
  XENPA34 (XENP022083 [ICOS]_H0.33_L0 scFv)
QVQLVQSGAEVKKPGASVKVSCKASGYTFTGYYMHWVRQAPGQGLEWMGWINPHSGGTNYAQKFQGRVTMTRDTSISTAYMELSRLRSDDTAVYYCARTYYYDSSGYYHTAFDIWGQGTMVTVSSGKPGSGKPGSGKPGSGKPGSDIQMTQSPSSVSASVGDRVTITCRASQGISRLLAWYQQKPGKAPKLLIYVASSLQSGVPSRFSGSGSGTDFTLTISSLQPEDFATYYCQQANSFPWTFGQGTKVEIK

SEQ ID NO: 28591 - protein, 252 aa, Artificial Sequence
  Description of Artificial Sequence: Synthetic polypeptide
  XENPA35 (XENP022084 [ICOS]_H0.34_L0 scFv)
QVQLVQSGAEVKKPGASVKVSCKASGYTFTGYYMHWVRQAPGQGLEWMGWINPHSGGTNYAQKFQGRVTMTRDTSISTAYMELSRLRSDDTAVYYCARTYYYDSSGYYHDAFDVWGQGTMVTVSSGKPGSGKPGSGKPGSGKPGSDIQMTQSPSSVSASVGDRVTITCRASQGISRLLAWYQQKPGKAPKLLIYVASSLQSGVPSRFSGSGSGTDFTLTISSLQPEDFATYYCQQANSFPWTFGQGTKVEIK

SEQ ID NO: 28592 - protein, 252 aa, Artificial Sequence
  Description of Artificial Sequence: Synthetic polypeptide
  XENPA36 (XENP022085 [ICOS]_H0_L0.1 scFv)
QVQLVQSGAEVKKPGASVKVSCKASGYTFTGYYMHWVRQAPGQGLEWMGWINPHSGGTNYAQKFQGRVTMTRDTSISTAYMELSRLRSDDTAVYYCARTYYYDSSGYYHDAFDIWGQGTMVTVSSGKPGSGKPGSGKPGSGKPGSDIQMTQSPSSLSASVGDRVTITCRASQGISRLLAWYQQKPGKAPKLLIYVASSLQSGVPSRFSGSGSGTDFTLTISSLQPEDFATYYCQQANSFPWTFGQGTKVEIK

SEQ ID NO: 28593 - protein, 252 aa, Artificial Sequence
  Description of Artificial Sequence: Synthetic polypeptide
  XENPA37 (XENP022086 [ICOS]_H0_L0.2 scFv)
QVQLVQSGAEVKKPGASVKVSCKASGYTFTGYYMHWVRQAPGQGLEWMGWINPHSGGTNYAQKFQGRVTMTRDTSISTAYMELSRLRSDDTAVYYCARTYYYDSSGYYHDAFDIWGQGTMVTVSSGKPGSGKPGSGKPGSGKPGSDIQMTQSPSSVSASVGDRVTITCQASQGISRLLAWYQQKPGKAPKLLIYVASSLQSGVPSRFSGSGSGTDFTLTISSLQPEDFATYYCQQANSFPWTFGQGTKVEIK

SEQ ID NO: 28594 - protein, 252 aa, Artificial Sequence
  Description of Artificial Sequence: Synthetic polypeptide
  XENPA38 (XENP022087 [ICOS]_H0_L0.3 scFv)
QVQLVQSGAEVKKPGASVKVSCKASGYTFTGYYMHWVRQAPGQGLEWMGWINPHSGGTNYAQKFQGRVTMTRDTSISTAYMELSRLRSDDTAVYYCARTYYYDSSGYYHDAFDIWGQGTMVTVSSGKPGSGKPGSGKPGSGKPGSDIQMTQSPSSVSASVGDRVTITCRASQDISRLLAWYQQKPGKAPKLLIYVASSLQSGVPSRFSGSGSGTDFTLTISSLQPEDFATYYCQQANSFPWTFGQGTKVEIK

SEQ ID NO: 28595 - protein, 252 aa, Artificial Sequence
  Description of Artificial Sequence: Synthetic polypeptide
  XENPA39 (XENP022088 [ICOS]_H0_L0.4 scFv)
QVQLVQSGAEVKKPGASVKVSCKASGYTFTGYYMHWVRQAPGQGLEWMGWINPHSGGTNYAQKFQGRVTMTRDTSISTAYMELSRLRSDDTAVYYCARTYYYDSSGYYHDAFDIWGQGTMVTVSSGKPGSGKPGSGKPGSGKPGSDIQMTQSPSSVSASVGDRVTITCRASQSISRLLAWYQQKPGKAPKLLIYVASSLQSGVPSRFSGSGSGTDFTLTISSLQPEDFATYYCQQANSFPWTFGQGTKVEIK

SEQ ID NO: 28596 - protein, 252 aa, Artificial Sequence
  Description of Artificial Sequence: Synthetic polypeptide
  XENPA40 (XENP022089 [ICOS]_H0_L0.5 scFv)
QVQLVQSGAEVKKPGASVKVSCKASGYTFTGYYMHWVRQAPGQGLEWMGWINPHSGGTNYAQKFQGRVTMTRDTSISTAYMELSRLRSDDTAVYYCARTYYYDSSGYYHDAFDIWGQGTMVTVSSGKPGSGKPGSGKPGSGKPGSDIQMTQSPSSVSASVGDRVTITCRASQGISSLLAWYQQKPGKAPKLLIYVASSLQSGVPSRFSGSGSGTDFTLTISSLQPEDFATYYCQQANSFPWTFGQGTKVEIK

SEQ ID NO: 28597 - protein, 464 aa, Artificial Sequence
  Description of Artificial Sequence: Synthetic polypeptide
  XENPA41 (XENP022090 [ICOS]_H0_L0.6 scFv)
QVQLVQSGAEVKKPGASVKVSCKASGYTFTGYYMHWVRQAPGQGLEWMGWINPHSGGTNYAQKFQGRVTMTRDTSISTAYMELSRLRSDDTAVYYCARTYYYDSSGYYHDAFDIWGQGTMVTVSSASTKGPSVFPLAPSSKSTSGGTAALGCLVKDYFPEPVTVSWNSGALTSGVHTFPAVLQSSGLYSLSSVVTVPSSSLGTQTYICNVNHKPSNTKVDKKVEPKSCGSGKPGSGKPGSGKPGSGKPGSDIQMTQSPSSVSASVGDRVTITCRASQGISSWLAWYQQKPGKAPKLLIYVASSLQSGVPSRFSGSGSGTDFTLTISSLQPEDFATYYCQQANSFPWTFGQGTKVEIKRTVAAPSVFIFPPSDEQLKSGTASVVCLLNNFYPREAKVQWKVDNALQSGNSQESVTEQDSKDSTYSLSSTLTLSKADYEKHKVYACEVTHQGLSSPVTKSFNRGEC

SEQ ID NO: 28598 - protein, 252 aa, Artificial Sequence
  Description of Artificial Sequence: Synthetic polypeptide
  XENPA42 (XENP022091 [ICOS]_H0_L0.7 scFv)
QVQLVQSGAEVKKPGASVKVSCKASGYTFTGYYMHWVRQAPGQGLEWMGWINPHSGGTNYAQKFQGRVTMTRDTSISTAYMELSRLRSDDTAVYYCARTYYYDSSGYYHDAFDIWGQGTMVTVSSGKPGSGKPGSGKPGSGKPGSDIQMTQSPSSVSASVGDRVTITCRASQGISSYLAWYQQKPGKAPKLLIYVASSLQSGVPSRFSGSGSGTDFTLTISSLQPEDFATYYCQQANSFPWTFGQGTKVEIK

SEQ ID NO: 28599 - protein, 252 aa, Artificial Sequence
  Description of Artificial Sequence: Synthetic polypeptide
  XENPA43 (XENP022092 [ICOS]_H0_L0.8 scFv)
QVQLVQSGAEVKKPGASVKVSCKASGYTFTGYYMHWVRQAPGQGLEWMGWINPHSGGTNYAQKFQGRVTMTRDTSISTAYMELSRLRSDDTAVYYCARTYYYDSSGYYHDAFDIWGQGTMVTVSSGKPGSGKPGSGKPGSGKPGSDIQMTQSPSSVSASVGDRVTITCRASQGISRWLAWYQQKPGKAPKLLIYVASSLQSGVPSRFSGSGSGTDFTLTISSLQPEDFATYYCQQANSFPWTFGQGTKVEIK

SEQ ID NO: 28600 - protein, 252 aa, Artificial Sequence
  Description of Artificial Sequence: Synthetic polypeptide
  XENPA44 (XENP022093 [ICOS]_H0_L0.9 scFv)
QVQLVQSGAEVKKPGASVKVSCKASGYTFTGYYMHWVRQAPGQGLEWMGWINPHSGGTNYAQKFQGRVTMTRDTSISTAYMELSRLRSDDTAVYYCARTYYYDSSGYYHDAFDIWGQGTMVTVSSGKPGSGKPGSGKPGSGKPGSDIQMTQSPSSVSASVGDRVTITCRASQGISRYLAWYQQKPGKAPKLLIYVASSLQSGVPSRFSGSGSGTDFTLTISSLQPEDFATYYCQQANSFPWTFGQGTKVEIK

SEQ ID NO: 28601 - protein, 252 aa, Artificial Sequence
  Description of Artificial Sequence: Synthetic polypeptide
  XENPA45 (XENP022094 [ICOS]_H0_L0.10 scFv)
QVQLVQSGAEVKKPGASVKVSCKASGYTFTGYYMHWVRQAPGQGLEWMGWINPHSGGTNYAQKFQGRVTMTRDTSISTAYMELSRLRSDDTAVYYCARTYYYDSSGYYHDAFDIWGQGTMVTVSSGKPGSGKPGSGKPGSGKPGSDIQMTQSPSSVSASVGDRVTITCRASQGISRLLAWYQQKPGKAPKLLIYAASSLQSGVPSRFSGSGSGTDFTLTISSLQPEDFATYYCQQANSFPWTFGQGTKVEIK

SEQ ID NO: 28602 - protein, 252 aa, Artificial Sequence
  Description of Artificial Sequence: Synthetic polypeptide
  XENPA46 (XENP022095 [ICOS]_H0_L0.11 scFv)
QVQLVQSGAEVKKPGASVKVSCKASGYTFTGYYMHWVRQAPGQGLEWMGWINPHSGGTNYAQKFQGRVTMTRDTSISTAYMELSRLRSDDTAVYYCARTYYYDSSGYYHDAFDIWGQGTMVTVSSGKPGSGKPGSGKPGSGKPGSDIQMTQSPSSVSASVGDRVTITCRASQGISRLLAWYQQKPGKAPKLLIYSASSLQSGVPSRFSGSGSGTDFTLTISSLQPEDFATYYCQQANSFPWTFGQGTKVEIK

SEQ ID NO: 28603 - protein, 252 aa, Artificial Sequence
  Description of Artificial Sequence: Synthetic polypeptide
  XENPA47 (XENP022096 [ICOS]_H0_L0.12 scFv)
QVQLVQSGAEVKKPGASVKVSCKASGYTFTGYYMHWVRQAPGQGLEWMGWINPHSGGTNYAQKFQGRVTMTRDTSISTAYMELSRLRSDDTAVYYCARTYYYDSSGYYHDAFDIWGQGTMVTVSSGKPGSGKPGSGKPGSGKPGSDIQMTQSPSSVSASVGDRVTITCRASQGISRLLAWYQQKPGKAPKLLIYVASTLQSGVPSRFSGSGSGTDFTLTISSLQPEDFATYYCQQANSFPWTFGQGTKVEIK

SEQ ID NO: 28604 - protein, 252 aa, Artificial Sequence
  Description of Artificial Sequence: Synthetic polypeptide
  XENPA48 (XENP022101 [ICOS]_H0_L0.13 scFv)
QVQLVQSGAEVKKPGASVKVSCKASGYTFTGYYMHWVRQAPGQGLEWMGWINPHSGGTNYAQKFQGRVTMTRDTSISTAYMELSRLRSDDTAVYYCARTYYYDSSGYYHDAFDIWGQGTMVTVSSGKPGSGKPGSGKPGSGKPGSDIQMTQSPSSVSASVGDRVTITCRASQGISRLLAWYQQKPGKAPKLLIYVASSLESGVPSRFSGSGSGTDFTLTISSLQPEDFATYYCQQANSFPWTFGQGTKVEIK

SEQ ID NO: 28605 - protein, 252 aa, Artificial Sequence
  Description of Artificial Sequence: Synthetic polypeptide
  XENPA49 (XENP022102 [ICOS]_H0_L0.14 scFv)
QVQLVQSGAEVKKPGASVKVSCKASGYTFTGYYMHWVRQAPGQGLEWMGWINPHSGGTNYAQKFQGRVTMTRDTSISTAYMELSRLRSDDTAVYYCARTYYYDSSGYYHDAFDIWGQGTMVTVSSGKPGSGKPGSGKPGSGKPGSDIQMTQSPSSVSASVGDRVTITCRASQGISRLLAWYQQKPGKAPKLLIYVASSLQSGVPSRFSGSGSGTDFTLTISSLQPEDFATYYCQQSNSFPWTFGQGTKVEIK

SEQ ID NO: 28606 - protein, 252 aa, Artificial Sequence
  Description of Artificial Sequence: Synthetic polypeptide
  XENPA50 (XENP022103 [ICOS]_H0_L0.15 scFv)
QVQLVQSGAEVKKPGASVKVSCKASGYTFTGYYMHWVRQAPGQGLEWMGWINPHSGGTNYAQKFQGRVTMTRDTSISTAYMELSRLRSDDTAVYYCARTYYYDSSGYYHDAFDIWGQGTMVTVSSGKPGSGKPGSGKPGSGKPGSDIQMTQSPSSVSASVGDRVTITCRASQGISRLLAWYQQKPGKAPKLLIYVASSLQSGVPSRFSGSGSGTDFTLTISSLQPEDFATYYCQQAESFPWTFGQGTKVEIK

SEQ ID NO: 28607 - protein, 252 aa, Artificial Sequence
  Description of Artificial Sequence: Synthetic polypeptide
  XENPA51 (XENP022104 [ICOS]_H0_L0.16 scFv)
QVQLVQSGAEVKKPGASVKVSCKASGYTFTGYYMHWVRQAPGQGLEWMGWINPHSGGTNYAQKFQGRVTMTRDTSISTAYMELSRLRSDDTAVYYCARTYYYDSSGYYHDAFDIWGQGTMVTVSSGKPGSGKPGSGKPGSGKPGSDIQMTQSPSSVSASVGDRVTITCRASQGISRLLAWYQQKPGKAPKLLIYVASSLQSGVPSRFSGSGSGTDFTLTISSLQPEDFATYYCQQAQSFPWTFGQGTKVEIK

SEQ ID NO: 28608 - protein, 252 aa, Artificial Sequence
  Description of Artificial Sequence: Synthetic polypeptide
  XENPA52 (XENP022105 [ICOS]_H0_L0.17 scFv)
QVQLVQSGAEVKKPGASVKVSCKASGYTFTGYYMHWVRQAPGQGLEWMGWINPHSGGTNYAQKFQGRVTMTRDTSISTAYMELSRLRSDDTAVYYCARTYYYDSSGYYHDAFDIWGQGTMVTVSSGKPGSGKPGSGKPGSGKPGSDIQMTQSPSSVSASVGDRVTITCRASQGISRLLAWYQQKPGKAPKLLIYVASSLQSGVPSRFSGSGSGTDFTLTISSLQPEDFATYYCQQAYSFPWTFGQGTKVEIK

SEQ ID NO: 28609 - protein, 252 aa, Artificial Sequence
  Description of Artificial Sequence: Synthetic polypeptide
  XENPA53 (XENP022106 [ICOS]_H0_L0.18 scFv)
QVQLVQSGAEVKKPGASVKVSCKASGYTFTGYYMHWVRQAPGQGLEWMGWINPHSGGTNYAQKFQGRVTMTRDTSISTAYMELSRLRSDDTAVYYCARTYYYDSSGYYHDAFDIWGQGTMVTVSSGKPGSGKPGSGKPGSGKPGSDIQMTQSPSSVSASVGDRVTITCRASQGISRLLAWYQQKPGKAPKLLIYVASSLQSGVPSRFSGSGSGTDFTLTISSLQPEDFATYYCQQANTFPWTFGQGTKVEIK

SEQ ID NO: 28610 - protein, 252 aa, Artificial Sequence
  Description of Artificial Sequence: Synthetic polypeptide
  XENPA54 (XENP022107 [ICOS]_H0_L0.19 scFv)
QVQLVQSGAEVKKPGASVKVSCKASGYTFTGYYMHWVRQAPGQGLEWMGWINPHSGGTNYAQKFQGRVTMTRDTSISTAYMELSRLRSDDTAVYYCARTYYYDSSGYYHDAFDIWGQGTMVTVSSGKPGSGKPGSGKPGSGKPGSDIQMTQSPSSVSASVGDRVTITCRASQGISRLLAWYQQKPGKAPKLLIYVASSLQSGVPSRFSGSGSGTDFTLTISSLQPEDFATYYCQQANSTPWTFGQGTKVEIK

SEQ ID NO: 28611 - protein, 252 aa, Artificial Sequence
  Description of Artificial Sequence: Synthetic polypeptide
  XENPA55 (XENP022108 [ICOS]_H0_L0.20 scFv)
QVQLVQSGAEVKKPGASVKVSCKASGYTFTGYYMHWVRQAPGQGLEWMGWINPHSGGTNYAQKFQGRVTMTRDTSISTAYMELSRLRSDDTAVYYCARTYYYDSSGYYHDAFDIWGQGTMVTVSSGKPGSGKPGSGKPGSGKPGSDIQMTQSPSSVSASVGDRVTITCRASQGISRLLAWYQQKPGKAPKLLIYVASSLQSGVPSRFSGSGSGTDFTLTISSLQPEDFATYYCQQANSYPWTFGQGTKVEIK

SEQ ID NO: 28612 - protein, 252 aa, Artificial Sequence
  Description of Artificial Sequence: Synthetic polypeptide
  XENPA56 (XENP022767 [ICOS]_H0_L0.21 scFv)
QVQLVQSGAEVKKPGASVKVSCKASGYTFTGYYMHWVRQAPGQGLEWMGWINPHSGGTNYAQKFQGRVTMTRDTSISTAYMELSRLRSDDTAVYYCARTYYYDSSGYYHDAFDIWGQGTMVTVSSGKPGSGKPGSGKPGSGKPGSDIQMTQSPSSVSASVGDRVTITCRASQDISSLLAWYQQKPGKAPKLLIYVASSLQSGVPSRFSGSGSGTDFTLTISSLQPEDFATYYCQQANSFPWTFGQGTKVEIK

SEQ ID NO: 28613 - protein, 252 aa, Artificial Sequence
  Description of Artificial Sequence: Synthetic polypeptide
  XENPA57 (XENP022768 [ICOS]_H0_L0.22 scFv)
QVQLVQSGAEVKKPGASVKVSCKASGYTFTGYYMHWVRQAPGQGLEWMGWINPHSGGTNYAQKFQGRVTMTRDTSISTAYMELSRLRSDDTAVYYCARTYYYDSSGYYHDAFDIWGQGTMVTVSSGKPGSGKPGSGKPGSGKPGSDIQMTQSPSSVSASVGDRVTITCRASQDISRLLAWYQQKPGKAPKLLIYAASSLQSGVPSRFSGSGSGTDFTLTISSLQPEDFATYYCQQANSFPWTFGQGTKVEIK

SEQ ID NO: 28614 - protein, 252 aa, Artificial Sequence
  Description of Artificial Sequence: Synthetic polypeptide
  XENPA58 (XENP022769 [ICOS]_H0_L0.23 scFv)
QVQLVQSGAEVKKPGASVKVSCKASGYTFTGYYMHWVRQAPGQGLEWMGWINPHSGGTNYAQKFQGRVTMTRDTSISTAYMELSRLRSDDTAVYYCARTYYYDSSGYYHDAFDIWGQGTMVTVSSGKPGSGKPGSGKPGSGKPGSDIQMTQSPSSVSASVGDRVTITCRASQDISRLLAWYQQKPGKAPKLLIYVASSLQSGVPSRFSGSGSGTDFTLTISSLQPEDFATYYCQQAESFPWTFGQGTKVEIK

SEQ ID NO: 28615 - protein, 252 aa, Artificial Sequence
  Description of Artificial Sequence: Synthetic polypeptide
  XENPA59 (XENP022770 [ICOS]_H0_L0.24 scFv)
QVQLVQSGAEVKKPGASVKVSCKASGYTFTGYYMHWVRQAPGQGLEWMGWINPHSGGTNYAQKFQGRVTMTRDTSISTAYMELSRLRSDDTAVYYCARTYYYDSSGYYHDAFDIWGQGTMVTVSSGKPGSGKPGSGKPGSGKPGSDIQMTQSPSSVSASVGDRVTITCRASQGISSLLAWYQQKPGKAPKLLIYAASSLQSGVPSRFSGSGSGTDFTLTISSLQPEDFATYYCQQANSFPWTFGQGTKVEIK

SEQ ID NO: 28616 - protein, 252 aa, Artificial Sequence
  Description of Artificial Sequence: Synthetic polypeptide
  XENPA60 (XENP022771 [ICOS]_H0_L0.25 scFv)
QVQLVQSGAEVKKPGASVKVSCKASGYTFTGYYMHWVRQAPGQGLEWMGWINPHSGGTNYAQKFQGRVTMTRDTSISTAYMELSRLRSDDTAVYYCARTYYYDSSGYYHDAFDIWGQGTMVTVSSGKPGSGKPGSGKPGSGKPGSDIQMTQSPSSVSASVGDRVTITCRASQGISSLLAWYQQKPGKAPKLLIYVASSLQSGVPSRFSGSGSGTDFTLTISSLQPEDFATYYCQQAESFPWTFGQGTKVEIK

SEQ ID NO: 28617 - protein, 252 aa, Artificial Sequence
  Description of Artificial Sequence: Synthetic polypeptide
  XENPA61 (XENP022772 [ICOS]_H0_L0.26 scFv)
QVQLVQSGAEVKKPGASVKVSCKASGYTFTGYYMHWVRQAPGQGLEWMGWINPHSGGTNYAQKFQGRVTMTRDTSISTAYMELSRLRSDDTAVYYCARTYYYDSSGYYHDAFDIWGQGTMVTVSSGKPGSGKPGSGKPGSGKPGSDIQMTQSPSSVSASVGDRVTITCRASQGISRLLAWYQQKPGKAPKLLIYAASSLQSGVPSRFSGSGSGTDFTLTISSLQPEDFATYYCQQAESFPWTFGQGTKVEIK

SEQ ID NO: 28618 - protein, 252 aa, Artificial Sequence
  Description of Artificial Sequence: Synthetic polypeptide
  XENPA62 (XENP022773 [ICOS]_H0_L0.27 scFv)
QVQLVQSGAEVKKPGASVKVSCKASGYTFTGYYMHWVRQAPGQGLEWMGWINPHSGGTNYAQKFQGRVTMTRDTSISTAYMELSRLRSDDTAVYYCARTYYYDSSGYYHDAFDIWGQGTMVTVSSGKPGSGKPGSGKPGSGKPGSDIQMTQSPSSVSASVGDRVTITCRASQDISSLLAWYQQKPGKAPKLLIYAASSLQSGVPSRFSGSGSGTDFTLTISSLQPEDFATYYCQQANSFPWTFGQGTKVEIK

SEQ ID NO: 28619 - protein, 252 aa, Artificial Sequence
  Description of Artificial Sequence: Synthetic polypeptide
  XENPA63 (XENP022774 [ICOS]_H0_L0.28 scFv)
QVQLVQSGAEVKKPGASVKVSCKASGYTFTGYYMHWVRQAPGQGLEWMGWINPHSGGTNYAQKFQGRVTMTRDTSISTAYMELSRLRSDDTAVYYCARTYYYDSSGYYHDAFDIWGQGTMVTVSSGKPGSGKPGSGKPGSGKPGSDIQMTQSPSSVSASVGDRVTITCRASQDISSLLAWYQQKPGKAPKLLIYVASSLQSGVPSRFSGSGSGTDFTLTISSLQPEDFATYYCQQAESFPWTFGQGTKVEIK

SEQ ID NO: 28620 - protein, 359 aa, Artificial Sequence
  Description of Artificial Sequence: Synthetic polypeptide
  XENPA64 (XENP022775 [ICOS]_H0_L0.29 scFv)
QVQLVQSGAEVKKPGASVKVSCKASGYTFTGYYMHWVRQAPGQGLEWMGWINPHSGGTNYAQKFQGRVTMTRDTSISTAYMELSRLRSDDTAVYYCARTYYYDSSGYYHDAFDIWGQGTMVTVSSGKPGSGKPGSGKPGSGKPGSDIQMTQSPSSVSASVGDRVTITCRASQDISRLLAWYQQKPGKAPKLLIYAASSLQSGVPSRFSGSGSGTDFTLTISSLQPEDFATYYCQQAESFPWTFGQGTKVEIKRTVAAPSVFIFPPSDEQLKSGTASVVCLLNNFYPREAKVQWKVDNALQSGNSQESVTEQDSKDSTYSLSSTLTLSKADYEKHKVYACEVTHQGLSSPVTKSFNRGEC

SEQ ID NO: 28621 - protein, 252 aa, Artificial Sequence
  Description of Artificial Sequence: Synthetic polypeptide
  XENPA65 (XENP022776 [ICOS]_H0_L0.30 scFv)
QVQLVQSGAEVKKPGASVKVSCKASGYTFTGYYMHWVRQAPGQGLEWMGWINPHSGGTNYAQKFQGRVTMTRDTSISTAYMELSRLRSDDTAVYYCARTYYYDSSGYYHDAFDIWGQGTMVTVSSGKPGSGKPGSGKPGSGKPGSDIQMTQSPSSVSASVGDRVTITCRASQGISSLLAWYQQKPGKAPKLLIYAASSLQSGVPSRFSGSGSGTDFTLTISSLQPEDFATYYCQQAESFPWTFGQGTKVEIK

SEQ ID NO: 28622 - protein, 252 aa, Artificial Sequence
  Description of Artificial Sequence: Synthetic polypeptide
  XENPA66 (XENP022777 [ICOS]_H0_L0.31 scFv)
QVQLVQSGAEVKKPGASVKVSCKASGYTFTGYYMHWVRQAPGQGLEWMGWINPHSGGTNYAQKFQGRVTMTRDTSISTAYMELSRLRSDDTAVYYCARTYYYDSSGYYHDAFDIWGQGTMVTVSSGKPGSGKPGSGKPGSGKPGSDIQMTQSPSSVSASVGDRVTITCRASQDISSLLAWYQQKPGKAPKLLIYAASSLQSGVPSRFSGSGSGTDFTLTISSLQPEDFATYYCQQAESFPWTFGQGTKVEIK

SEQ ID NO: 28623 - protein, 252 aa, Artificial Sequence
  Description of Artificial Sequence: Synthetic polypeptide
  XENPA67 (XENP022778 [ICOS]_H0_L0.32 scFv)
QVQLVQSGAEVKKPGASVKVSCKASGYTFTGYYMHWVRQAPGQGLEWMGWINPHSGGTNYAQKFQGRVTMTRDTSISTAYMELSRLRSDDTAVYYCARTYYYDSSGYYHDAFDIWGQGTMVTVSSGKPGSGKPGSGKPGSGKPGSDIQMTQSPSSVSASVGDRVTITCQASQDISSLLAWYQQKPGKAPKLLIYVASSLQSGVPSRFSGSGSGTDFTLTISSLQPEDFATYYCQQANSFPWTFGQGTKVEIK

SEQ ID NO: 28624 - protein, 252 aa, Artificial Sequence
  Description of Artificial Sequence: Synthetic polypeptide
  XENPA68 (XENP022779 [ICOS]_H0_L0.33 scFv)
QVQLVQSGAEVKKPGASVKVSCKASGYTFTGYYMHWVRQAPGQGLEWMGWINPHSGGTNYAQKFQGRVTMTRDTSISTAYMELSRLRSDDTAVYYCARTYYYDSSGYYHDAFDIWGQGTMVTVSSGKPGSGKPGSGKPGSGKPGSDIQMTQSPSSVSASVGDRVTITCQASQDISRLLAWYQQKPGKAPKLLIYAASSLQSGVPSRFSGSGSGTDFTLTISSLQPEDFATYYCQQANSFPWTFGQGTKVEIK

SEQ ID NO: 28625 - protein, 252 aa, Artificial Sequence
  Description of Artificial Sequence: Synthetic polypeptide
  XENPA69 (XENP022780 [ICOS]_H0_L0.34 scFv)
QVQLVQSGAEVKKPGASVKVSCKASGYTFTGYYMHWVRQAPGQGLEWMGWINPHSGGTNYAQKFQGRVTMTRDTSISTAYMELSRLRSDDTAVYYCARTYYYDSSGYYHDAFDIWGQGTMVTVSSGKPGSGKPGSGKPGSGKPGSDIQMTQSPSSVSASVGDRVTITCQASQDISRLLAWYQQKPGKAPKLLIYVASSLQSGVPSRFSGSGSGTDFTLTISSLQPEDFATYYCQQAESFPWTFGQGTKVEIK

SEQ ID NO: 28626 - protein, 252 aa, Artificial Sequence
  Description of Artificial Sequence: Synthetic polypeptide
  XENPA70 (XENP022781 [ICOS]_H0_L0.35 scFv)
QVQLVQSGAEVKKPGASVKVSCKASGYTFTGYYMHWVRQAPGQGLEWMGWINPHSGGTNYAQKFQGRVTMTRDTSISTAYMELSRLRSDDTAVYYCARTYYYDSSGYYHDAFDIWGQGTMVTVSSGKPGSGKPGSGKPGSGKPGSDIQMTQSPSSVSASVGDRVTITCQASQDISSLLAWYQQKPGKAPKLLIYAASSLQSGVPSRFSGSGSGTDFTLTISSLQPEDFATYYCQQANSFPWTFGQGTKVEIK

SEQ ID NO: 28627 - protein, 252 aa, Artificial Sequence
  Description of Artificial Sequence: Synthetic polypeptide
  XENPA71 (XENP022782 [ICOS]_H0_L0.36 scFv)
QVQLVQSGAEVKKPGASVKVSCKASGYTFTGYYMHWVRQAPGQGLEWMGWINPHSGGTNYAQKFQGRVTMTRDTSISTAYMELSRLRSDDTAVYYCARTYYYDSSGYYHDAFDIWGQGTMVTVSSGKPGSGKPGSGKPGSGKPGSDIQMTQSPSSVSASVGDRVTITCQASQDISSLLAWYQQKPGKAPKLLIYVASSLQSGVPSRFSGSGSGTDFTLTISSLQPEDFATYYCQQAESFPWTFGQGTKVEIK

SEQ ID NO: 28628 - protein, 252 aa, Artificial Sequence
  Description of Artificial Sequence: Synthetic polypeptide
  XENPA72 (XENP022783 [ICOS]_H0_L0.37 scFv)
QVQLVQSGAEVKKPGASVKVSCKASGYTFTGYYMHWVRQAPGQGLEWMGWINPHSGGTNYAQKFQGRVTMTRDTSISTAYMELSRLRSDDTAVYYCARTYYYDSSGYYHDAFDIWGQGTMVTVSSGKPGSGKPGSGKPGSGKPGSDIQMTQSPSSVSASVGDRVTITCQASQDISRLLAWYQQKPGKAPKLLIYAASSLQSGVPSRFSGSGSGTDFTLTISSLQPEDFATYYCQQAESFPWTFGQGTKVEIK

SEQ ID NO: 28629 - protein, 252 aa, Artificial Sequence
  Description of Artificial Sequence: Synthetic polypeptide
  XENPA73 (XENP022784 [ICOS]_H0_L0.38 scFv)
QVQLVQSGAEVKKPGASVKVSCKASGYTFTGYYMHWVRQAPGQGLEWMGWINPHSGGTNYAQKFQGRVTMTRDTSISTAYMELSRLRSDDTAVYYCARTYYYDSSGYYHDAFDIWGQGTMVTVSSGKPGSGKPGSGKPGSGKPGSDIQMTQSPSSVSASVGDRVTITCQASQDISSLLAWYQQKPGKAPKLLIYAASSLQSGVPSRFSGSGSGTDFTLTISSLQPEDFATYYCQQAESFPWTFGQGTKVEIK

SEQ ID NO: 28630 - protein, 252 aa, Artificial Sequence
  Description of Artificial Sequence: Synthetic polypeptide
  XENPA74 (XENP022860 [ICOS]_H0_L0.42 scFv)
QVQLVQSGAEVKKPGASVKVSCKASGYTFTGYYMHWVRQAPGQGLEWMGWINPHSGGTNYAQKFQGRVTMTRDTSISTAYMELSRLRSDDTAVYYCARTYYYDSSGYYHDAFDIWGQGTMVTVSSGKPGSGKPGSGKPGSGKPGSDIQMTQSPSSVSASVGDRVTITCQASQDISSYLAWYQQKPGKAPKLLIYVASSLQSGVPSRFSGSGSGTDFTLTISSLQPEDFATYYCQQAESFPWTFGQGTKVEIK

SEQ ID NO: 28631 - protein, 252 aa, Artificial Sequence
  Description of Artificial Sequence: Synthetic polypeptide
  XENPA75 (XENP022861 [ICOS]_H0_L0.43 scFv)
QVQLVQSGAEVKKPGASVKVSCKASGYTFTGYYMHWVRQAPGQGLEWMGWINPHSGGTNYAQKFQGRVTMTRDTSISTAYMELSRLRSDDTAVYYCARTYYYDSSGYYHDAFDIWGQGTMVTVSSGKPGSGKPGSGKPGSGKPGSDIQMTQSPSSVSASVGDRVTITCQASQDISSYLAWYQQKPGKAPKLLIYAASSLQSGVPSRFSGSGSGTDFTLTISSLQPEDFATYYCQQAESFPWTFGQGTKVEIK

SEQ ID NO: 28632 - protein, 252 aa, Artificial Sequence
  Description of Artificial Sequence: Synthetic polypeptide
  XENPA76 (XENP022862 [ICOS]_H0_L0.44 scFv)
QVQLVQSGAEVKKPGASVKVSCKASGYTFTGYYMHWVRQAPGQGLEWMGWINPHSGGTNYAQKFQGRVTMTRDTSISTAYMELSRLRSDDTAVYYCARTYYYDSSGYYHDAFDIWGQGTMVTVSSGKPGSGKPGSGKPGSGKPGSDIQMTQSPSSVSASVGDRVTITCQASQDISSYLAWYQQKPGKAPKLLIYAASSLQSGVPSRFSGSGSGTDFTLTISSLQPEDFATYYCQQANSFPWTFGQGTKVEIK

SEQ ID NO: 28633 - protein, 252 aa, Artificial Sequence
  Description of Artificial Sequence: Synthetic polypeptide
  XENPA77 (XENP022863 [ICOS]_H0.35_L0.38 scFv)
QVQLVQSGAEVKKPGASVKVSCKASGYTFTGYYMHWVRQAPGQGLEWMGWINPHSGGTNYAQKFQGRVTMTRDTSISTAYMELSRLRSDDTAVYYCARTYYYDTSGYYHDAFDVWGQGTMVTVSSGKPGSGKPGSGKPGSGKPGSDIQMTQSPSSVSASVGDRVTITCQASQDISSLLAWYQQKPGKAPKLLIYAASSLQSGVPSRFSGSGSGTDFTLTISSLQPEDFATYYCQQAESFPWTFGQGTKVEIK

SEQ ID NO: 28634 - protein, 252 aa, Artificial Sequence
  Description of Artificial Sequence: Synthetic polypeptide
  XENPA78 (XENP022864 [ICOS]_H0.35_L0.42 scFv)
QVQLVQSGAEVKKPGASVKVSCKASGYTFTGYYMHWVRQAPGQGLEWMGWINPHSGGTNYAQKFQGRVTMTRDTSISTAYMELSRLRSDDTAVYYCARTYYYDTSGYYHDAFDVWGQGTMVTVSSGKPGSGKPGSGKPGSGKPGSDIQMTQSPSSVSASVGDRVTITCQASQDISSYLAWYQQKPGKAPKLLIYVASSLQSGVPSRFSGSGSGTDFTLTISSLQPEDFATYYCQQAESFPWTFGQGTKVEIK

SEQ ID NO: 28635 - protein, 252 aa, Artificial Sequence
  Description of Artificial Sequence: Synthetic polypeptide
  XENPA79 (XENP022865 [ICOS]_H0.35_L0.43 scFv)
QVQLVQSGAEVKKPGASVKVSCKASGYTFTGYYMHWVRQAPGQGLEWMGWINPHSGGTNYAQKFQGRVTMTRDTSISTAYMELSRLRSDDTAVYYCARTYYYDTSGYYHDAFDVWGQGTMVTVSSGKPGSGKPGSGKPGSGKPGSDIQMTQSPSSVSASVGDRVTITCQASQDISSYLAWYQQKPGKAPKLLIYAASSLQSGVPSRFSGSGSGTDFTLTISSLQPEDFATYYCQQAESFPWTFGQGTKVEIK

SEQ ID NO: 28636 - protein, 252 aa, Artificial Sequence
  Description of Artificial Sequence: Synthetic polypeptide
  XENPA80 (XENP022866 [ICOS]_H0.35_L0.44 scFv)
QVQLVQSGAEVKKPGASVKVSCKASGYTFTGYYMHWVRQAPGQGLEWMGWINPHSGGTNYAQKFQGRVTMTRDTSISTAYMELSRLRSDDTAVYYCARTYYYDTSGYYHDAFDVWGQGTMVTVSSGKPGSGKPGSGKPGSGKPGSDIQMTQSPSSVSASVGDRVTITCQASQDISSYLAWYQQKPGKAPKLLIYAASSLQSGVPSRFSGSGSGTDFTLTISSLQPEDFATYYCQQANSFPWTFGQGTKVEIK

SEQ ID NO: 28637 - protein, 252 aa, Artificial Sequence
  Description of Artificial Sequence: Synthetic polypeptide
  XENPA81 (XENP022867 [ICOS]_H0.61_L0.38 scFv)
QVQLVQSGAEVKKPGASVKVSCKASGYTFTGYYMHWVRQAPGQGLEWMGIINPHSGGTNYAQKFQGRVTMTRDTSISTAYMELSRLRSDDTAVYYCARTYYYDTSGYYHDAFDVWGQGTMVTVSSGKPGSGKPGSGKPGSGKPGSDIQMTQSPSSVSASVGDRVTITCQASQDISSLLAWYQQKPGKAPKLLIYAASSLQSGVPSRFSGSGSGTDFTLTISSLQPEDFATYYCQQAESFPWTFGQGTKVEIK

SEQ ID NO: 28638 - protein, 252 aa, Artificial Sequence
  Description of Artificial Sequence: Synthetic polypeptide
  XENPA82 (XENP022868 [ICOS]_H0.61_L0.42 scFv)
QVQLVQSGAEVKKPGASVKVSCKASGYTFTGYYMHWVRQAPGQGLEWMGIINPHSGGTNYAQKFQGRVTMTRDTSISTAYMELSRLRSDDTAVYYCARTYYYDTSGYYHDAFDVWGQGTMVTVSSGKPGSGKPGSGKPGSGKPGSDIQMTQSPSSVSASVGDRVTITCQASQDISSYLAWYQQKPGKAPKLLIYVASSLQSGVPSRFSGSGSGTDFTLTISSLQPEDFATYYCQQAESFPWTFGQGTKVEIK

SEQ ID NO: 28639 - protein, 252 aa, Artificial Sequence
  Description of Artificial Sequence: Synthetic polypeptide
  XENPA83 (XENP022869 [ICOS]_H0.61_L0.43 scFv)
QVQLVQSGAEVKKPGASVKVSCKASGYTFTGYYMHWVRQAPGQGLEWMGIINPHSGGTNYAQKFQGRVTMTRDTSISTAYMELSRLRSDDTAVYYCARTYYYDTSGYYHDAFDVWGQGTMVTVSSGKPGSGKPGSGKPGSGKPGSDIQMTQSPSSVSASVGDRVTITCQASQDISSYLAWYQQKPGKAPKLLIYAASSLQSGVPSRFSGSGSGTDFTLTISSLQPEDFATYYCQQAESFPWTFGQGTKVEIK

SEQ ID NO: 28640 - protein, 252 aa, Artificial Sequence
  Description of Artificial Sequence: Synthetic polypeptide
  XENPA84 (XENP022870 [ICOS]_H0.61_L0.44 scFv)
QVQLVQSGAEVKKPGASVKVSCKASGYTFTGYYMHWVRQAPGQGLEWMGIINPHSGGTNYAQKFQGRVTMTRDTSISTAYMELSRLRSDDTAVYYCARTYYYDTSGYYHDAFDVWGQGTMVTVSSGKPGSGKPGSGKPGSGKPGSDIQMTQSPSSVSASVGDRVTITCQASQDISSYLAWYQQKPGKAPKLLIYAASSLQSGVPSRFSGSGSGTDFTLTISSLQPEDFATYYCQQANSFPWTFGQGTKVEIK

SEQ ID NO: 28641 - protein, 252 aa, Artificial Sequence
  Description of Artificial Sequence: Synthetic polypeptide
  XENPA85 (XENP022871 [ICOS]_H0.24_L0.38 scFv)
QVQLVQSGAEVKKPGASVKVSCKASGYTFTGYYMHWVRQAPGQGLEWMGWINPHSGGTNYAQKFQGRVTMTRDTSISTAYMELSRLRSDDTAVYYCARTYYYDTSGYYHDAFDIWGQGTMVTVSSGKPGSGKPGSGKPGSGKPGSDIQMTQSPSSVSASVGDRVTITCQASQDISSLLAWYQQKPGKAPKLLIYAASSLQSGVPSRFSGSGSGTDFTLTISSLQPEDFATYYCQQAESFPWTFGQGTKVEIK

SEQ ID NO: 28642 - protein, 252 aa, Artificial Sequence
  Description of Artificial Sequence: Synthetic polypeptide
  XENPA86 (XENP022872 [ICOS]_H0.37_L0.38 scFv)
QVQLVQSGAEVKKPGASVKVSCKASGYTFTGYYMHWVRQAPGQGLEWMGWINPHSGGTNYAQKFQGRVTMTRDTSISTAYMELSSLRSEDTAVYYCARTYYYDTSGYYHDAFDVWGQGTMVTVSSGKPGSGKPGSGKPGSGKPGSDIQMTQSPSSVSASVGDRVTITCQASQDISSLLAWYQQKPGKAPKLLIYAASSLQSGVPSRFSGSGSGTDFTLTISSLQPEDFATYYCQQAESFPWTFGQGTKVEIK

SEQ ID NO: 28643 - protein, 252 aa, Artificial Sequence
  Description of Artificial Sequence: Synthetic polypeptide
  XENPA87 (XENP022873 [ICOS]_H0.40_L0.38 scFv)
QVQLVQSGAEVKKPGASVKVSCKASGYTFTGYYMHWVRQAPGQGLEWMGWINPHSGETNYAQKFQGRVTMTRDTSISTAYMELSSLRSEDTAVYYCARTYYYDTSGYYHDAFDVWGQGTMVTVSSGKPGSGKPGSGKPGSGKPGSDIQMTQSPSSVSASVGDRVTITCQASQDISSLLAWYQQKPGKAPKLLIYAASSLQSGVPSRFSGSGSGTDFTLTISSLQPEDFATYYCQQAESFPWTFGQGTKVEIK

SEQ ID NO: 28644 - protein, 252 aa, Artificial Sequence
  Description of Artificial Sequence: Synthetic polypeptide
  XENPA88 (XENP022874 [ICOS]_H0.44_L0.38 scFv)
QVQLVQSGAEVKKPGASVKVSCKASGYTFTGYYMHWVRQAPGQGLEWMGWINPHSGGTNYAQKFQGRVTITADESTSTAYMELSRLRSDDTAVYYCARTYYYDTSGYYHDAFDVWGQGTMVTVSSGKPGSGKPGSGKPGSGKPGSDIQMTQSPSSVSASVGDRVTITCQASQDISSLLAWYQQKPGKAPKLLIYAASSLQSGVPSRFSGSGSGTDFTLTISSLQPEDFATYYCQQAESFPWTFGQGTKVEIK

SEQ ID NO: 28645 - protein, 252 aa, Artificial Sequence
  Description of Artificial Sequence: Synthetic polypeptide
  XENPA89 (XENP022875 [ICOS]_H0.56_L0.38 scFv)
QVQLVQSGAEVKKPGASVKVSCKASGYTFTGYYMHWVRQAPGQGLEWMGIINPHSGGTNYAQKFQGRVTMTRDTSISTAYMELSRLRSDDTAVYYCARTYYYDTSGYYHDAFDIWGQGTMVTVSSGKPGSGKPGSGKPGSGKPGSDIQMTQSPSSVSASVGDRVTITCQASQDISSLLAWYQQKPGKAPKLLIYAASSLQSGVPSRFSGSGSGTDFTLTISSLQPEDFATYYCQQAESFPWTFGQGTKVEIK

SEQ ID NO: 28646 - protein, 252 aa, Artificial Sequence
  Description of Artificial Sequence: Synthetic polypeptide
  XENPA90 (XENP022876 [ICOS]_H0.62_L0.38 scFv)
QVQLVQSGAEVKKPGASVKVSCKASGYTFTGYYMHWVRQAPGQGLEWMGWINPHSGGTNYAQKFQGRVTMTEDTSTDTAYMELSRLRSDDTAVYYCARTYYYDTSGYYHDAFDVWGQGTMVTVSSGKPGSGKPGSGKPGSGKPGSDIQMTQSPSSVSASVGDRVTITCQASQDISSLLAWYQQKPGKAPKLLIYAASSLQSGVPSRFSGSGSGTDFTLTISSLQPEDFATYYCQQAESFPWTFGQGTKVEIK

SEQ ID NO: 28647 - protein, 252 aa, Artificial Sequence
  Description of Artificial Sequence: Synthetic polypeptide
  XENPA91 (XENP022929 [ICOS]_H0.35_L0.36 scFv)
QVQLVQSGAEVKKPGASVKVSCKASGYTFTGYYMHWVRQAPGQGLEWMGWINPHSGGTNYAQKFQGRVTMTRDTSISTAYMELSRLRSDDTAVYYCARTYYYDTSGYYHDAFDVWGQGTMVTVSSGKPGSGKPGSGKPGSGKPGSDIQMTQSPSSVSASVGDRVTITCQASQDISSLLAWYQQKPGKAPKLLIYVASSLQSGVPSRFSGSGSGTDFTLTISSLQPEDFATYYCQQAESFPWTFGQGTKVEIK

SEQ ID NO: 28648 - protein, 252 aa, Artificial Sequence
  Description of Artificial Sequence: Synthetic polypeptide
  XENPA92 (XENP022930 [ICOS]_H0.61_L0.36 scFv)
QVQLVQSGAEVKKPGASVKVSCKASGYTFTGYYMHWVRQAPGQGLEWMGIINPHSGGTNYAQKFQGRVTMTRDTSISTAYMELSRLRSDDTAVYYCARTYYYDTSGYYHDAFDVWGQGTMVTVSSGKPGSGKPGSGKPGSGKPGSDIQMTQSPSSVSASVGDRVTITCQASQDISSLLAWYQQKPGKAPKLLIYVASSLQSGVPSRFSGSGSGTDFTLTISSLQPEDFATYYCQQAESFPWTFGQGTKVEIK

SEQ ID NO: 28649 - protein, 252 aa, Artificial Sequence
  Description of Artificial Sequence: Synthetic polypeptide
  XENPA93 (XENP022938 [ICOS]_H0.24_L0.37 scFv)
QVQLVQSGAEVKKPGASVKVSCKASGYTFTGYYMHWVRQAPGQGLEWMGWINPHSGGTNYAQKFQGRVTMTRDTSISTAYMELSRLRSDDTAVYYCARTYYYDTSGYYHDAFDIWGQGTMVTVSSGKPGSGKPGSGKPGSGKPGSDIQMTQSPSSVSASVGDRVTITCQASQDISRLLAWYQQKPGKAPKLLIYAASSLQSGVPSRFSGSGSGTDFTLTISSLQPEDFATYYCQQAESFPWTFGQGTKVEIK

SEQ ID NO: 28650 - protein, 252 aa, Artificial Sequence
  Description of Artificial Sequence: Synthetic polypeptide
  XENPA94 (XENP022939 [ICOS]_H0.37_L0.37 scFv)
QVQLVQSGAEVKKPGASVKVSCKASGYTFTGYYMHWVRQAPGQGLEWMGWINPHSGGTNYAQKFQGRVTMTRDTSISTAYMELSSLRSEDTAVYYCARTYYYDTSGYYHDAFDVWGQGTMVTVSSGKPGSGKPGSGKPGSGKPGSDIQMTQSPSSVSASVGDRVTITCQASQDISRLLAWYQQKPGKAPKLLIYAASSLQSGVPSRFSGSGSGTDFTLTISSLQPEDFATYYCQQAESFPWTFGQGTKVEIK

SEQ ID NO: 28651 - protein, 252 aa, Artificial Sequence
  Description of Artificial Sequence: Synthetic polypeptide
  XENPA95 (XENP022940 [ICOS]_H0.40_L0.37 scFv)
QVQLVQSGAEVKKPGASVKVSCKASGYTFTGYYMHWVRQAPGQGLEWMGWINPHSGETNYAQKFQGRVTMTRDTSISTAYMELSSLRSEDTAVYYCARTYYYDTSGYYHDAFDVWGQGTMVTVSSGKPGSGKPGSGKPGSGKPGSDIQMTQSPSSVSASVGDRVTITCQASQDISRLLAWYQQKPGKAPKLLIYAASSLQSGVPSRFSGSGSGTDFTLTISSLQPEDFATYYCQQAESFPWTFGQGTKVEIK

SEQ ID NO: 28652 - protein, 252 aa, Artificial Sequence
  Description of Artificial Sequence: Synthetic polypeptide
  XENPA96 (XENP022941 [ICOS]_H0.44_L0.37 scFv)
QVQLVQSGAEVKKPGASVKVSCKASGYTFTGYYMHWVRQAPGQGLEWMGWINPHSGGTNYAQKFQGRVTITADESTSTAYMELSRLRSDDTAVYYCARTYYYDTSGYYHDAFDVWGQGTMVTVSSGKPGSGKPGSGKPGSGKPGSDIQMTQSPSSVSASVGDRVTITCQASQDISRLLAWYQQKPGKAPKLLIYAASSLQSGVPSRFSGSGSGTDFTLTISSLQPEDFATYYCQQAESFPWTFGQGTKVEIK

SEQ ID NO: 28653 - protein, 252 aa, Artificial Sequence
  Description of Artificial Sequence: Synthetic polypeptide
  XENPA97 (XENP022942 [ICOS]_H0.56_L0.37 scFv)
QVQLVQSGAEVKKPGASVKVSCKASGYTFTGYYMHWVRQAPGQGLEWMGIINPHSGGTNYAQKFQGRVTMTRDTSISTAYMELSRLRSDDTAVYYCARTYYYDTSGYYHDAFDIWGQGTMVTVSSGKPGSGKPGSGKPGSGKPGSDIQMTQSPSSVSASVGDRVTITCQASQDISRLLAWYQQKPGKAPKLLIYAASSLQSGVPSRFSGSGSGTDFTLTISSLQPEDFATYYCQQAESFPWTFGQGTKVEIK

SEQ ID NO: 28654 - protein, 252 aa, Artificial Sequence
  Description of Artificial Sequence: Synthetic polypeptide
  XENPA98 (XENP022943 [ICOS]_H0.62_L0.37 scFv)
QVQLVQSGAEVKKPGASVKVSCKASGYTFTGYYMHWVRQAPGQGLEWMGWINPHSGGTNYAQKFQGRVTMTEDTSTDTAYMELSRLRSDDTAVYYCARTYYYDTSGYYHDAFDVWGQGTMVTVSSGKPGSGKPGSGKPGSGKPGSDIQMTQSPSSVSASVGDRVTITCQASQDISRLLAWYQQKPGKAPKLLIYAASSLQSGVPSRFSGSGSGTDFTLTISSLQPEDFATYYCQQAESFPWTFGQGTKVEIK

SEQ ID NO: 28655 - protein, 252 aa, Artificial Sequence
  Description of Artificial Sequence: Synthetic polypeptide
  XENPA99 (XENP022944 [ICOS]_H0.35_L0.34 scFv)
QVQLVQSGAEVKKPGASVKVSCKASGYTFTGYYMHWVRQAPGQGLEWMGWINPHSGGTNYAQKFQGRVTMTRDTSISTAYMELSRLRSDDTAVYYCARTYYYDTSGYYHDAFDVWGQGTMVTVSSGKPGSGKPGSGKPGSGKPGSDIQMTQSPSSVSASVGDRVTITCQASQDISRLLAWYQQKPGKAPKLLIYVASSLQSGVPSRFSGSGSGTDFTLTISSLQPEDFATYYCQQAESFPWTFGQGTKVEIK

SEQ ID NO: 28656 - protein, 252 aa, Artificial Sequence
  Description of Artificial Sequence: Synthetic polypeptide
  XENPA100 (XENP022945 [ICOS]_H0.35_L0.35 scFv)
QVQLVQSGAEVKKPGASVKVSCKASGYTFTGYYMHWVRQAPGQGLEWMGWINPHSGGTNYAQKFQGRVTMTRDTSISTAYMELSRLRSDDTAVYYCARTYYYDTSGYYHDAFDVWGQGTMVTVSSGKPGSGKPGSGKPGSGKPGSDIQMTQSPSSVSASVGDRVTITCQASQDISSLLAWYQQKPGKAPKLLIYAASSLQSGVPSRFSGSGSGTDFTLTISSLQPEDFATYYCQQANSFPWTFGQGTKVEIK

SEQ ID NO: 28657 - protein, 252 aa, Artificial Sequence
  Description of Artificial Sequence: Synthetic polypeptide
  XENPA101 (XENP022946 [ICOS]_H0.35_L0.37 scFv)
QVQLVQSGAEVKKPGASVKVSCKASGYTFTGYYMHWVRQAPGQGLEWMGWINPHSGGTNYAQKFQGRVTMTRDTSISTAYMELSRLRSDDTAVYYCARTYYYDTSGYYHDAFDVWGQGTMVTVSSGKPGSGKPGSGKPGSGKPGSDIQMTQSPSSVSASVGDRVTITCQASQDISRLLAWYQQKPGKAPKLLIYAASSLQSGVPSRFSGSGSGTDFTLTISSLQPEDFATYYCQQAESFPWTFGQGTKVEIK

SEQ ID NO: 28658 - protein, 252 aa, Artificial Sequence
  Description of Artificial Sequence: Synthetic polypeptide
  XENPA102 (XENP022947 [ICOS]_H0.61_L0.34 scFv)
QVQLVQSGAEVKKPGASVKVSCKASGYTFTGYYMHWVRQAPGQGLEWMGIINPHSGGTNYAQKFQGRVTMTRDTSISTAYMELSRLRSDDTAVYYCARTYYYDTSGYYHDAFDVWGQGTMVTVSSGKPGSGKPGSGKPGSGKPGSDIQMTQSPSSVSASVGDRVTITCQASQDISRLLAWYQQKPGKAPKLLIYVASSLQSGVPSRFSGSGSGTDFTLTISSLQPEDFATYYCQQAESFPWTFGQGTKVEIK

SEQ ID NO: 28659 - protein, 252 aa, Artificial Sequence
  Description of Artificial Sequence: Synthetic polypeptide
  XENPA103 (XENP022948 [ICOS]_H0.61_L0.35 scFv)
QVQLVQSGAEVKKPGASVKVSCKASGYTFTGYYMHWVRQAPGQGLEWMGIINPHSGGTNYAQKFQGRVTMTRDTSISTAYMELSRLRSDDTAVYYCARTYYYDTSGYYHDAFDVWGQGTMVTVSSGKPGSGKPGSGKPGSGKPGSDIQMTQSPSSVSASVGDRVTITCQASQDISSLLAWYQQKPGKAPKLLIYAASSLQSGVPSRFSGSGSGTDFTLTISSLQPEDFATYYCQQANSFPWTFGQGTKVEIK

SEQ ID NO: 28660 - protein, 252 aa, Artificial Sequence
  Description of Artificial Sequence: Synthetic polypeptide
  XENPA104 (XENP022949 [ICOS]_H0.61_L0.37 scFv)
QVQLVQSGAEVKKPGASVKVSCKASGYTFTGYYMHWVRQAPGQGLEWMGIINPHSGGTNYAQKFQGRVTMTRDTSISTAYMELSRLRSDDTAVYYCARTYYYDTSGYYHDAFDVWGQGTMVTVSSGKPGSGKPGSGKPGSGKPGSDIQMTQSPSSVSASVGDRVTITCQASQDISRLLAWYQQKPGKAPKLLIYAASSLQSGVPSRFSGSGSGTDFTLTISSLQPEDFATYYCQQAESFPWTFGQGTKVEIK

SEQ ID NO: 28661 - protein, 252 aa, Artificial Sequence
  Description of Artificial Sequence: Synthetic polypeptide
  XENPA105 (XENP023086 [ICOS]_H0.37_L0 scFv)
QVQLVQSGAEVKKPGASVKVSCKASGYTFTGYYMHWVRQAPGQGLEWMGWINPHSGGTNYAQKFQGRVTMTRDTSISTAYMELSSLRSEDTAVYYCARTYYYDTSGYYHDAFDVWGQGTMVTVSSGKPGSGKPGSGKPGSGKPGSDIQMTQSPSSVSASVGDRVTITCRASQGISRLLAWYQQKPGKAPKLLIYVASSLQSGVPSRFSGSGSGTDFTLTISSLQPEDFATYYCQQANSFPWTFGQGTKVEIK

SEQ ID NO: 28662 - protein, 252 aa, Artificial Sequence
  Description of Artificial Sequence: Synthetic polypeptide
  XENPA106 (XENP023087 [ICOS]_H0.64_L0 scFv)
QVQLVQSGAEVKKPGASVKVSCKASGYTFTGYYMHWVRQAPGQGLEWMGWINPHSGGTNYAQKFQGRVTMTEDTSTDTAYMELSSLRSEDTAVYYCARTYYYDTSGYYHDAFDVWGQGTMVTVSSGKPGSGKPGSGKPGSGKPGSDIQMTQSPSSVSASVGDRVTITCRASQGISRLLAWYQQKPGKAPKLLIYVASSLQSGVPSRFSGSGSGTDFTLTISSLQPEDFATYYCQQANSFPWTFGQGTKVEIK

SEQ ID NO: 28663 - protein, 252 aa, Artificial Sequence
  Description of Artificial Sequence: Synthetic polypeptide
  XENPA107 (XENP023088 [ICOS]_H0.66_L0 scFv)
QVQLVQSGAEVKKPGASVKVSCKASGYTFTGYYMHWVRQAPGQGLEWMGWINPHSGETIYAQKFQGRVTMTRDTSISTAYMELSSLRSEDTAVYYCARTYYYDTSGYYHDAFDVWGQGTMVTVSSGKPGSGKPGSGKPGSGKPGSDIQMTQSPSSVSASVGDRVTITCRASQGISRLLAWYQQKPGKAPKLLIYVASSLQSGVPSRFSGSGSGTDFTLTISSLQPEDFATYYCQQANSFPWTFGQGTKVEIK

SEQ ID NO: 28664 - protein, 252 aa, Artificial Sequence
  Description of Artificial Sequence: Synthetic polypeptide
  XENPA108 (XENP023089 [ICOS]_H0.67_L0 scFv)
QVQLVQSGAEVKKPGASVKVSCKASGYTFTGYYMHWVRQAPGQGLEWMGWINPHSGETIYAQKFQGRVTMTEDTSTDTAYMELSSLRSEDTAVYYCARTYYYDTSGYYHDAFDVWGQGTMVTVSSGKPGSGKPGSGKPGSGKPGSDIQMTQSPSSVSASVGDRVTITCRASQGISRLLAWYQQKPGKAPKLLIYVASSLQSGVPSRFSGSGSGTDFTLTISSLQPEDFATYYCQQANSFPWTFGQGTKVEIK

SEQ ID NO: 28665 - protein, 252 aa, Artificial Sequence
  Description of Artificial Sequence: Synthetic polypeptide
  XENPA109 (XENP023409 [ICOS]_H0.66_L0.34 scFv)
QVQLVQSGAEVKKPGASVKVSCKASGYTFTGYYMHWVRQAPGQGLEWMGWINPHSGETIYAQKFQGRVTMTRDTSISTAYMELSSLRSEDTAVYYCARTYYYDTSGYYHDAFDVWGQGTMVTVSSGKPGSGKPGSGKPGSGKPGSDIQMTQSPSSVSASVGDRVTITCQASQDISRLLAWYQQKPGKAPKLLIYVASSLQSGVPSRFSGSGSGTDFTLTISSLQPEDFATYYCQQAESFPWTFGQGTKVEIK

SEQ ID NO: 28666 - protein, 6 aa, Artificial Sequence
  Description of Artificial Sequence: Synthetic 6xHis tag
HHHHHH

SEQ ID NO: 28667 - protein, 13 aa, Artificial Sequence
  Description of Artificial Sequence: Synthetic peptide
ASTKGPSVFPLAP

SEQ ID NO: 28668 - protein, 13 aa, Artificial Sequence
  Description of Artificial Sequence: Synthetic peptide
RTVAAPSVFIFPP
